(19) United States
(12) Patent Application Publication
(10) Pub. No.: US 2024/0199714 A1
(43) Pub. Date: Jun. 20, 2024

(54) IL-2 BASED CONSTRUCTS

(71) Applicants: Orionis Biosciences, Inc., Waltham, MA (US); Orionis Biosciences BV, Ghent (BE)

(72) Inventors: Nikolai KLEY, Waltham, MA (US); Erik DEPLA, Ghent (BE); Lennart ZABEAU, Ghent (BE); Anje CAUWELS, Ghent (BV)

(21) Appl. No.: 18/286,147

(22) PCT Filed: Apr. 16, 2022
(86) PCT No.: PCT/US22/25143

§ 371 Date: Oct. 9, 2023

Related U.S. Application Data
(60) Provisional application No. 63/297,330, filed on Jan. 7, 2022.
(60) Provisional application No. 63/175,827, filed on Apr. 16, 2021.

(51) Int. Cl. C07K 14/55; A61K 38/00; A61P 35/00

(52) U.S. Cl. CPC C07K 14/55; A61P 35/00; A61K 38/00; C07K 2319/01; C07K 2319/30; C07K 2319/33

(57) ABSTRACT

The present invention relates, in part, to chimeric proteins or chimeric protein complexes, such as Fc-based chimeric protein complexes, comprising interleukin 2, or a variant thereof, and their use as therapeutic agents.

### CROSS-REFERENCE TO RELATED APPLICATIONS

[0001] This application claims the benefit of U.S. Provisional Patent Application Nos. 63/175,827, filed Apr. 16, 2021, and 63/297,330, filed Jan. 7, 2022, the entire contents of all of which are hereby incorporated by reference in their entirety.

### FIELD

[0002] The present invention relates, in part, to chimeric proteins, or chimeric protein complexes (including Fc-based chimeric protein complexes) comprising interleukin 2 (IL-2) or variants thereof and their use as therapeutic agents.

### SEQUENCE LISTING

[0003] The contents of the text file submitted electronically herewith are incorporated herein by reference in their entirety. A computer readable format copy of the Sequence Listing (filename: ORN-080PC_ST25.txt, date created: Apr. 14, 2022; file size: 1,151,315 bytes).

### BACKGROUND

[0004] Interleukin 2 (IL-2) is a member of a cytokine family, each member of which has a four alpha helix bundle. IL-2 signals through the IL-2 receptor, a complex consisting of two or three polypeptide chains, i.e., the alpha and/or beta and gamma chains.

[0005] IL-2 has been approved for cancer treatment with a high-dose regimen. Illustrative cancers treated with IL-2 include renal cell (kidney) and melanoma, a skin cancer.

[0006] IL-2 stimulates immune cell proliferation and activation through receptor-signaling complexes containing alpha (IL-2Rα, CD25) and/or beta (IL-2Rβ, CD122), and common gamma receptor polypeptide chains (γc, CD132), but the effects are pleiotropic and contextual. At high doses, IL-2 binds to heterodimeric IL-2Rβγ receptor leading to desired expansion of tumor killing CD8⁺ effector, memory T cells, and NK cells. IL-2 also binds to its heterotrimeric receptor IL-2Rαβγ with greater affinity, which expands immunosuppressive CD4⁺CD25⁺ regulatory T cells (Tregs) expressing high constitutive levels of IL-2Rα. Expansion of Tregs represents an undesirable effect of IL-2 for cancer immunotherapy. Furthermore, activation of IL-2Rαβγ on endothelial cells can cause vascular leak syndrome (VLS).

[0007] Conversely, stimulation of CD8⁺ T cells represents an undesirable effect of IL-2 in autoimmune disease therapy, where stimulation of Tregs by IL-2 is desired to suppress autoreactive CD8⁺ T cells. Due to its overall pleiotropic effects on multiple cell types, IL-2 therapies have been plagued by significant side effects and systemic toxicities, including vascular leakage syndrome (VLS), limiting exploitation of its therapeutic potential.

[0008] Constructs for receptor selective IL-2 have been made (e.g., IL-2Rα and IL-2Rβ interaction deficient or attenuated constructs). However, these constructs still have side effect and toxicity issues. Some of the issues could be ameliorated with reducing dose (e.g., via extension of half-life), but the dose reduction alone does not solve cell-selectivity issues. As such, there remains a need for IL-2-based agents that have reduced cellular side effects (off-target effects) and lower systemic toxicity for use in IL-2Rβγ targeting (e.g., for CD8⁺ T cells activation in the treatment of cancer, for Thelp cells activation in the treatment of cancer, and for NK cells activation in the treatment of cancer) and IL-2Rαβγ targeting (e.g., for Treg stimulation in autoimmune diseases).

[0009] Accordingly, there remains a need for safe and effective IL-2-based therapeutics with improved target selectivity, pharmacokinetic and therapeutic properties and minimal toxicity profiles.

### SUMMARY

[0010] Accordingly, in some aspects, the present invention relates to chimeric proteins and chimeric protein complexes, including Fc-based chimeric protein complexes, comprising a modified IL-2 as a signaling agent. In some embodiments, the modified IL-2 is a modified wild type IL-2, wherein the wild type IL-2 has the amino acid sequence of SEQ ID NO: 1. In some embodiments, the modified IL-2 is a modified neoleukin, wherein the neoleukin has the amino acid sequence of SEQ ID NO: 2.

[0011] In some embodiments, the modified IL-2 signaling agent comprises: (i) a mutation selected from D20E, D20F, D20G, D20H, D20I, D20K, D20L, and D20V; or (ii) a mutation selected from N88G, N88E, N88K, N88Q, and N88V; or (iii) a mutation selected from Q126G, Q126A, Q126E, Q126F, Q126H, Q126I, Q126K, Q126L, Q126N, Q126P, Q126R, Q126S, Q126T, Q126V, Q126W, and Q126Y; or (iv) a mutation selected from (i) and (iii) or a mutation selected from (ii) and (iii); or (v) one or more mutations selected from: R38A/F42K/N88G/C125A, F42K/C125A, D20E/C125A, D20F/C125A, D20G/C125A, D20H/C125A, D20I/C125A, D20K/C125A, D20L/C125A, D20N/C125A, D20S/C125A, D20T/C125A, D20V/C125A, N88A/C125A, N88D/C125A, N88G/C125A, N88E/C125A, N88H/C125A, N88I/C125A, N88K/C125A, N88Q/C125A, N88R/C125A, N88T/C125A, N88V/C125A, D20E/R38A/F42K, D20E/R38A/F42K/C125A, D20V/R38A/F42K, D20V/R38A/F42K/C125A, R38A/F42Y/E62A/C125A, R38A/F42Y/Y45A/E62A, F42Y/Y45A/L72G, R38A/F42Y/Y45A/E62A/C125A, F42Y/Y45A/L72G/C125A, R38A/F42K/N88G, R38A/F42K/Q126G, R38A/F42K/Q126I, R38A/F42K/Q126Y, R38A/F42K/Q126G/C125A, R38A/F42K/Q126I/C125A, R38A/F42K/Q126Y/C125A, R38A/F42K/E62A/N88G, and R38A/F42K/E62A/N88G/C125A.

[0012] In some embodiments, the modified IL-2 signaling agent comprises one or more mutations at an amino acid residue selected from R38, F42, E62, C125, Y45, L72, D20, N88, and Q126 relative to SEQ ID NO: 1. In such embodiments, the modified IL-2 signaling agent comprises one or more mutations selected from R38A, F42K, F42Y, E62A, C125A, Y45A, L72G, D20E, D20F, D20G, D20H, D20I, D20K, D20L, D20N, D20V, N88G, N88E, N88I, N88K, N88Q, N88R, N88V, R38A/F42Y/E62A/C125A, F42Y/Y45A/L72G/C125A, F42K/C125A, R38A/F42K/C125A, D20E/C125A, D20G/C125A, D20S/C125A, D20T/C125A, D20V/C125A, N88A/C125A, N88D/C125A, N88G/C125A, N88H/C125A, N88Q/C125A, N88T/C125A, D20E/R38A/F42K/C125A, D20V/R38A/F42K/C125A, R38A/F42K/N88A/C125A, R38A/F42K/N88G/C125A, Q126A, Q126E, Q126F, Q126G, Q126H, Q126I, Q126K, Q126L, Q126N, Q126P, Q126R, Q126S, Q126T, Q126V, Q126W, and Q126Y, relative to SEQ ID NO: 1.

[0013] In various embodiments, the modified IL-2 signaling agent comprises one or more mutations selected from D20V, D20E, N88G, F42K/C125A, D20E/C125A, D20G/C125A, D20S/C125A, D20T/C125A, D20V/C125A, N88A/C125A, N88D/C125A, N88G/C125A, N88H/C125A, N88Q/C125A, N88T/C125A, D20E/R38A/F42K, D20E/R38A/F42K/C125A, D20V/R38A/F42K, D20V/R38A/F42K/C125A, D20V/R38A/F42K/E62A, D20V/R38A/F42K/E62A/C125A, R38A/F42K/N88G, R38A/F42K/N88G/C125A, R38A/F42K/E62A/N88G, R38A/F42K/E62A/N88G/C125A, Q126A, Q126E, Q126F, Q126G, Q126H, Q126I, Q126K, Q126L, Q126N, Q126P, Q126R, Q126S, Q126T, Q126V, Q126W, and Q126Y, relative to SEQ ID NO: 1.

[0014] In particular embodiments, the modified IL-2 signaling agent comprises one or more mutations selected from R38A/F42Y/E62A/C125A, F42Y/Y45A/L72G/C125A, F42K/C125A, D20E/C125A, D20G/C125A, D20S/C125A, D20T/C125A, D20V/C125A, N88A/C125A, N88D/C125A, N88G/C125A, N88H/C125A, N88Q/C125A, N88T/C125A, D20E/R38A/F42K/C125A, D20V/R38A/F42K/C125A, and R38A/F42K/N88G/C125A, relative to SEQ ID NO: 1.

[0015] In some embodiments, the modified IL-2 signaling agent is modified neoleukin, which comprises the amino acid sequence of SEQ ID NO: 2. In such embodiments, the modified IL-2 signaling agent comprising SEQ ID NO: 2 has one or more mutations at amino acid residues D15 and/or N40. For example, in some embodiments, the modified IL-2 signaling agent comprising SEQ ID NO: 2 comprises D15T, D15H, N401, N40G, or N40R.

[0016] In some embodiments, the one or more mutations or modifications improve the safety profile of the modified IL-2, relative to, for example, wild type IL-2. In some embodiments, the one or more mutations or modifications reduce the biological activity of the modified IL-2, relative to, for example, wild type IL-2. For example, the one or more mutations or modifications may reduce the affinity of the modified IL-2 for a target receptor. In some embodiments, the target receptor is the heterotrimeric receptor IL-2Rαβγ, which is composed of the IL-2Rα, IL-2Rβ, and IL-2Ry subunits. In some embodiments, the target receptor is the heterodimeric receptor IL-2Rβγ, which is composed of the IL-2RB and IL-2Ry subunits. In some embodiments, the modified IL-2 comprises one or more mutations or modifications that reduce its affinity for IL-2Rα subunit. In another embodiment, the modified IL-2 comprises one or more mutations or modifications that reduce its affinity for IL-2Rβ. In yet another embodiment, the modified IL-2 comprises one or more mutations or modifications that reduce its affinity for IL-2Ry. In an embodiment, the modified IL-2 comprises one or more mutations or modifications that reduce its affinity for any combination of IL-2Rα, IL-2Rβ, and IL-2Ry (e.g., one or more mutations or modifications that reduce the modified IL-2's affinity for IL-2Rα, IL-2Rβ, and IL-2Ry or for IL-2Rα and IL-2RB or for IL-2Ry and IL-2RB or for IL-2Rα and IL-2Ry).

[0017] In some embodiments, the modified IL-2 exhibits reduced affinity and/or activity for IL-2Rα and IL2Rβ, optionally wherein the modified IL-2 comprises one or more mutations selected from D20E/R38A/F42K, D20E/R38A/F42K/C125A, D20V/R38A/F42K, D20V/R38A/F42K/C125A, D20V/R38A/F42K/E62A, D20V/R38A/F42K/E62A/C125A, R38A/F42K/N88G, R38A/F42K/N88G/C125A, R38A/F42K/E62A/N88G, and R38A/F42K/E62A/N88G/C125A.

[0018] In some embodiments, the modified IL-2 exhibits reduced affinity and/or activity for IL-2Rα and IL-2Rγ, optionally wherein the modified IL-2 comprises one or more mutations selected from R38A/F42K/Q126G, R38A/F42K/Q126I, and R38A/F42K/Q126Y.

[0019] In some embodiments, the modified IL-2 exhibits reduced affinity and/or activity for IL-2Rβ, optionally wherein the modified IL-2 comprises one or more mutations selected from D20E, D20F, D20G, D20H, D20I, D20K, D20L, D20V, N88G, N88E, N88K, N88Q, N88V, D20E/C125A, D20F/C125A, D20G/C125A, D20H/C125A, D20I/C125A, D20L/C125A, D20K/C125A, D20N/C125A, D20S/C125A, D20T/C125A, D20V/C125A, N88A/C125A, N88D/C125A, N88G/C125A, N88E/C125A, N88H/C125A, N88I/C125A, N88K/C125A, N88Q/C125A, N88R/C125A, N88T/C125A, and N88V/C125A.

[0020] In some embodiments, the modified IL-2 exhibits reduced affinity and/or activity for IL-2Rγ, optionally wherein the modified IL-2 comprises one or more mutations selected from Q126A, Q126E, Q126F, Q126G, Q126H, Q126I, Q126K, Q126L, Q126N, Q126P, Q126R, Q126S, Q126T, Q126V, Q126W, and Q126Y.

[0021] In some embodiments, the modified IL-2 exhibits reduced affinity and/or activity for IL-2Rβγ, optionally wherein the modified IL-2 comprises one or more mutations selected from D20E/Q126A, D20E/Q126D, D20E/Q126E, D20E/Q126F, D20E/Q126G, D20E/Q126H, D20E/Q126I, D20E/Q126K, D20E/Q126L, D20E/Q126M, D20E/Q126N, D20E/Q126P, D20E/Q126R, D20E/Q126S, D20E/Q126T, D20E/Q126V, D20E/Q126W, D20E/Q126Y, D20V/Q126A, D20V/Q126D, D20V/Q126E, D20V/Q126F, D20V/Q126G, D20V/Q126H, D20V/Q126I, D20V/Q126K, D20V/Q126L, D20V/Q126M, D20V/Q126N, D20V/Q126P, D20V/Q126R, D20V/Q126S, D20V/Q126T, D20V/Q126V, D20V/Q126W, D20V/Q126Y, N88A/Q126A, N88A/Q126D, N88A/Q126E, N88A/Q126F, N88A/Q126G, N88A/Q126H, N88A/Q126I, N88A/Q126K, N88A/Q126L, N88A/Q126M, N88A/Q126N, N88A/Q126P, N88A/Q126R, N88A/Q126S, N88A/Q126T, N88A/Q126V, N88A/Q126W, N88A/Q126Y, N88G/Q126A, N88G/Q126D, N88G/Q126E, N88G/Q126F, N88G/Q126G, N88G/Q126H, N88G/Q126I, N88G/Q126K, N88G/Q126L, N88G/Q126M, N88G/Q126N, N88G/Q126P, N88G/Q126R, N88G/Q126S, N88G/Q126T, N88G/Q126V, N88G/Q126W, and N88G/Q126Y. In further embodiments, the modified IL-2 exhibits reduced affinity and/or activity for IL-2Rβγ and exhibits increased selectivity toward activated CD8 cells.

[0022] In another aspect, the modified IL-2 exhibits reduced affinity and/or activity for IL-2Rβ and comprises a single mutation relative to a wild type signaling agent having SEQ ID NO: 1 selected from D20E, D20F, D20G, D20H, D20I, D20K, D20L, D20N, D20V, N88G, N88E, N88I, N88K, N88Q, N88R and N88V, D20E/C125A, D20F/C125A, D20G/C125A, D20H/C125A, D20I/C125A, D20K/C125A, D20L/C125A, D20N/C125A, D20S/C125A, D20T/C125A, D20V/C125A, N88A/C125A, N88D/C125A, N88G/C125A, N88H/C125A, N88Q/C125A, and N88T/C125A, and includes no mutation that confers reduced affinity or bioactivity for the IL-2R alpha subunit (IL-2Rα). In further embodiments, the modified IL-2 exhibits reduced affinity and/or activity for IL-2RB and exhibits increased selectivity toward activated CD8 cells and decreased selectivity toward Tregs.

[0023] In some embodiments, the target receptor is the heterotrimeric receptor IL-2Rαβγ, which is composed of the IL-2Rα, IL-2Rβ, and IL-2Ry subunits. In some embodiments, the target receptor is the heterodimeric receptor IL-2Rβγ, which is composed of the IL-2Rβ and IL-2Ry subunits.

[0024] In some embodiments, the IL-2 has one or more mutations or modifications: one or more mutations or modifications that reduce or ablate the activity or affinity of the modified IL-2 for an IL-2Rα chain; and/or one or more mutations or modifications that reduce the activity or affinity of the modified IL-2 for an IL-2R lacking an a chain. In some embodiments, the mutations or modifications that reduce the activity or affinity of the modified IL-2 and/or attenuate the modified IL-2 are restorable at a target cell or site of therapeutic action through a targeting moiety that is linked to the modified IL-2.

[0025] In some embodiments, the IL-2 has one or more mutations or modifications: one or more mutations or modifications that reduces the activity or affinity of the modified IL-2 for an IL-2R lacking an a chain and/or one or more mutations or modifications that reduce the activity or affinity of the modified IL-2 for an IL-2R comprising an a chain, such mutation or modification being an attenuation mutation for which the activity or affinity is restorable by induced proximity at/to a target or a site of therapeutic action (e.g., a cell or the extracellular matrix) through a targeting moiety.

[0026] In various embodiments, the present invention contemplates a chimeric protein, a chimeric protein complex, or a Fc-based chimeric protein complex comprising a modified IL-2-signaling agent that comprises a glycosylation mutation. In some embodiments, the glycosylation mutation decreases or eliminates glycosylation of the modified IL-2 signaling agent. In some embodiments, the glycosylation mutation is a T3 substitution, wherein the mutation is one of T3A, T3F, T3H, T3L, T3V, and T3Y. In some embodiments, the glysosylation mutation is a deletion of the first 3, 4, 5, 6, 7, or 8 residues of the modified IL-2.

[0027] In some embodiments, the chimeric protein comprises one or more additional signaling agents, e.g., without limitation, an interferon, an interleukin, and a tumor necrosis factor, that may be modified.

[0028] In some embodiments, the chimeric protein comprises one or more targeting moieties which allow for a restoration of the weakened or attenuated activity described herein (e.g. on IL-2). In some embodiments, the chimeric protein comprises one or more targeting moieties which have recognition domains (e.g. antigen recognition domains, including without limitation various antibody formats, inclusive of single-domain antibodies) that specifically bind to a target (e.g. antigen, receptor) of interest. In various embodiments, the targeting moieties have recognition domains that specifically bind to a target (e.g. antigen, receptor) of interest, including those found on one or more immune cells, which can include, without limitation, T cells, Tregs, cytotoxic T lymphocytes, T helper cells, natural killer (NK) cells, natural killer T (NKT) cells, anti-tumor or tumor macrophages (e.g. M1 or M2 macrophages, respectively), B cells, and dendritic cells. In some embodiments, the immune cell is a T cell and the targeting moiety targets CD8. In embodiments, the immune cell is a Treg and the targeting moiety targets CTLA4. In embodiments, the immune cell is an NK cell and the targeting moiety is NKp46.

[0029] In some embodiments, the recognition domains specifically bind to a target (e.g. antigen, receptor) of interest and effectively recruit one of more immune cells. In some embodiments, the targets (e.g. antigens, receptors) of interest can be found on one or more tumor cells. In some embodiments, the present chimeric proteins may recruit an immune cell, e.g. an immune cell that can kill and/or suppress a tumor cell, to a site of action (such as, by way of non-limiting example, the tumor microenvironment). In some embodiments, the recognition domain binds to a target of interest found in a normal tissue of interest. In some embodiments the present chimeric proteins may bind to a target cell to direct localization of the chimeric protein to a tissue cell of interest while also capable of binding to a second, different cell type (e.g., an immune cell) to impart a tissue localized biological effect mediated by the modified IL-2. In some embodiments, the recognition domains specifically bind to a target (e.g. antigen, receptor) of interest which is part of a non-cellular structure.

[0030] In various embodiments, the chimeric protein of the present technology provides improved cell target selectivity, safety and/or therapeutic activity and/or pharmacokinetic profiles (e.g., increased serum half-life) compared to an untargeted modified IL-2.

[0031] In some embodiments, the chimeric protein of the present technology is a single chain polypeptide.

[0032] In some embodiments, the chimeric protein of the present technology is a protein complex comprising two or more polypeptide chains. In some embodiments, the targeting moiety (or moieties) and the signaling agent(s) (e.g., modified IL-2) are on the same polypeptide chain in the protein complex. In some embodiments, the targeting moiety (or moieties) and the signaling agent(s) (e.g., modified IL-2) are on different polypeptide chains in the protein complex.

[0033] In various embodiments, the present chimeric proteins find use in the treatment of various diseases or disorders such as cancer, infections, immune disorders, autoimmune diseases, cardiovascular diseases, wound healing, ischemia-related diseases, neurodegenerative diseases, metabolic diseases and many other diseases and disorders, and the present invention encompasses various methods of treatment.

[0034] In another aspect, the present invention relates to Fc-based chimeric protein complexes comprising a modified IL-2 as a signaling agent. In some embodiments, the Fc-based chimeric protein complex of the present invention comprises a polypeptide having an amino acid sequence having at least 90%, or at least 95%, or at least 96%, or at least 97%, or at least 98%, or at least 99% identity with any one of SEQ ID NOs: 291-296, 298-335. In particular embodiments, the Fc-based chimeric protein complex of the present invention comprises a polypeptide having an amino acid sequence having at least 90%, or at least 95%, or at least 96%, or at least 97%, or at least 98%, or at least 99% identity with any one of SEQ ID NOs: 292, 293, 294, 299, 301, 310, 311, 312, 315, 316, 319, 320, 325, 328, 332, 333, and 335.

[0035] In some embodiments, the present invention relates to a chimeric protein or an Fc-based chimeric protein complex comprising a polypeptide having an amino acid sequence having at least 90%, or at least 95%, or at least 96%, or at least 97%, or at least 98%, or at least 99% identity with any one of SEQ ID NOs: 290-449, 478-495, or 501-531.

### BRIEF DESCRIPTION OF THE DRAWINGS

[0036] FIGS. 1A-F, 2A-H, 3A-H, 4A-D, 5A-F, 6A-J, 7A-D, 8A-F, 9A-J, 10A-F, 11A-L, 12A-L, 13A-F, 14A-L, 15A-L, 16A-J, 17A-J, 18A-F, and 19A-F show various non-limiting illustrative schematics of the Fc-based chimeric protein complexes of the present invention. In embodiments, each schematic is a composition of the present invention. Where applicable in the figures, “TM” refers to a “targeting moiety” as described herein, “SA” refers to a “signaling agent” as described herein, [symbol] is an optional “linker” as described herein, the two long parallel rectangles are human Fc domains, e.g. from IgG1, from IgG2, or from IgG4, as described herein and optionally with effector knock-out and/or stabilization mutations as also described herein, and the two long parallel rectangles with one having a protrusion and the other having an indentation are human Fc domains, e.g. from IgG1, from IgG2, or from IgG4 as described herein, with knob-in-hole and/or ionic pair (a/k/a charged pairs, ionic bond, or charged residue pair) mutations as described herein and optionally with effector knock-out and/or stabilization mutations as also described herein. At least one signaling agent is IL-2, or modified IL-2, or neoleukin, or modified neoleukin.

[0037] FIGS. 1A-F show illustrative homodimeric 2-chain complexes. These figures show illustrative configurations for the homodimeric 2-chain complexes.

[0038] FIGS. 2A-H show illustrative homodimeric 2-chain complexes with two targeting moieties TM (as described herein, more targeting moieties may be present in some embodiments). In embodiments, the position of TM1 and TM2 are interchangeable. In embodiments, the constructs shown in the box (i.e., FIGS. 2G and 2H) have signaling agent (SA) between TM1 and TM2 or between TM1 and Fc.

[0039] FIGS. 3A-H show illustrative homodimeric 2-chain complexes with two signaling agents (as described herein, more signaling agents may be present in some embodiments). In embodiments, the position of SA1 and SA2 are interchangeable. In embodiments, the constructs shown in the box (i.e., FIGS. 3G and 3H) have a TM between Fc and SA1 and/or SA2, N- or C-terminal of the Fc chains.

[0040] FIGS. 4A-D show illustrative heterodimeric 2-chain complexes with split TM and SA chains, namely the TM on the knob chain of the Fc and the SA on hole chain of the Fc.

[0041] FIGS. 5A-F show illustrative heterodimeric 2-chain complexes with split TM and SA chains, namely with both TMs on the knob chain of the Fc and with SA on hole chain of the Fc, with two targeting moieties (as described herein, more targeting moieties may be present in some embodiments). In embodiments, the position of TM1 and TM2 are interchangeable. In some embodiments, TM1 and TM2 can be identical.

[0042] FIGS. 6A-J show illustrative heterodimeric 2-chain complexes, namely with TM on the knob chain of the Fc and with two signaling agents (as described herein, more signaling agents may be present in some embodiments). In these orientations and/or configurations, one SA is on the knob chain and one SA is on the hole chain. In embodiments, the position of SA1 and SA2 are interchangeable.

[0043] FIGS. 7A-D show illustrative heterodimeric 2-chain complexes with split TM and SA chains, namely the SA on the knob chain of the Fc and the TM on hole chain of the Fc.

[0044] FIGS. 8A-F show illustrative heterodimeric 2-chain complexes with split TM and SA chains, namely with SA on the knob chain of the Fc and both TMs on hole chain of the Fc, with two targeting moieties (as described herein, more targeting moieties may be present in some embodiments). In embodiments, the position of TM1 and TM2 are interchangeable. In some embodiments, TM1 and TM2 can be identical.

[0045] FIGS. 9A-J show illustrative heterodimeric 2-chain complexes, namely with a TM on hole chain of the Fc and with two signaling agents (as described herein, more signaling agents may be present in some embodiments). In these orientations and/or configurations, one SA is on the knob chain and one SA is on the hole chain. In embodiments, the position of SA1 and SA2 are interchangeable.

[0046] FIGS. 10A-F show illustrative heterodimeric 2-chain complexes with TM and SA on the same chain, namely the SA and TM both on the knob chain of the Fc.

[0047] FIGS. 11A-L show illustrative heterodimeric 2-chain complexes with a TM and a SA on the same chain, namely with SA and with TM both on the knob chain of the Fc, with two targeting moieties (as described herein, more targeting moieties may be present in some embodiments). In embodiments, the position of TM1 and TM2 are interchangeable. In some embodiments, TM1 and TM2 can be identical.

[0048] FIGS. 12A-L show illustrative heterodimeric 2-chain complexes with a TM and a SA on the same chain, namely with SA and with TM both on the knob chain of the Fc, with two signaling agents (as described herein, more signaling agents may be present in some embodiments). In embodiments, the position of SA1 and SA2 are interchangeable.

[0049] FIGS. 13A-F show illustrative heterodimeric 2-chain complexes with TM and SA on the same chain, namely the SA and TM both on the hole chain of the Fc.

[0050] FIGS. 14A-L show illustrative heterodimeric 2-chain complexes with a TM and a SA on the same chain, namely with SA and with TM both on the hole chain of the Fc, with two targeting moieties (as described herein, more targeting moieties are present in some embodiments). In embodiments, the position of TM1 and TM2 are interchangeable. In embodiments, TM1 and TM2 can be identical.

[0051] FIGS. 15A-L show illustrative heterodimeric 2-chain complexes with a TM and a SA on the same chain, namely with SA and with TM both on the hole chain of the Fc, with two signaling agents (as described herein, more signaling agents may be present in some embodiments). In embodiments, the position of SA1 and SA2 are interchangeable.

[0052] FIGS. 16A-J show illustrative heterodimeric 2-chain complexes with two targeting moieties (as described herein, more targeting moieties may be present in some embodiments) and with SA on knob Fc and TM on each chain. In embodiments, TM1 and TM2 can be identical.

[0053] FIGS. 17A-J show illustrative heterodimeric 2-chain complexes with two targeting moieties (as described herein, more targeting moieties may be present in some embodiments) and with SA on hole Fc and TM on each chain. In embodiments, TM1 and TM2 can be identical.

[0054] FIGS. 18A-F show illustrative heterodimeric 2-chain complexes with two signaling agents (as described herein, more signaling agents may be present in some embodiments) and with split SA and TM chains: SA on knob and TM on hole Fc.

[0055] FIGS. 19A-F show illustrative heterodimeric 2-chain complexes with two signaling agents (as described herein, more signaling agents may be present in some embodiments) and with split SA and TM chains: TM on knob and SA on hole Fc.

[0056] FIG. 20 depicts IL-2 and Fc-IL-2 driven STAT5 phosphorylation in PBMC lymphocyte populations.

[0057] FIGS. 21A-G show the effect of CD25 knock-out mutations and CD8 targeting on STAT5 phosphorylation in lymphocyte populations.

[0058] FIGS. 22A-G depict sensorgrams of binding of IL-2 and Fc-IL-2 fusion-proteins to biotinylated CD25 in bio-layer interferometry.

[0059] FIGS. 23A-R depict screening of D20 mutants for pSTAT5 in CD8⁺, CD4⁺CD25, and CD4⁺CD25⁺ PMBCs.

[0060] FIGS. 24A-R depict screening of N88 mutants for pSTAT5 in CD8⁺, CD4⁺CD25, and CD4⁺CD25⁺ PMBCs

[0061] FIGS. 25A-D show the effect of beta mutations (here N88G) and CD8 targeting on STAT5 phosphorylation in PBMC sub-populations.

[0062] FIGS. 26A-J show various combinations of CD25 and IL-2RB mutations and their effect on pSTAT5 in PMBCs populations.

[0063] FIGS. 27A-B depict binding of CD25 scFv Fc-fusions to HEK-Blue IL-2 and HEK-Blue IL-1 cells in FACS.

[0064] FIG. 28 shows the effect of CD25 scFv Fc-fusions on wild type IL-2 signaling in HEK-Blue IL-2 cells.

[0065] FIGS. 29A-M depict the effect of CD25 targeting of ALN2 variants with CD25 or beta mutations on STAT5 phosphorylation in certain PBMC sub-populations.

[0066] FIGS. 30A-H show STAT5 phosphorylation in PBMC subpopulations by IL-2 and Fc-IL-2 mimic/neoleukin variants.

[0067] FIG. 31 depicts different bi-valent (if VHH1 and VHH2 are identical) or bi-specific (if VHH1 and VHH2 represent different targeting domains) knob-in-hole ALN2 formats.

[0068] FIG. 32 depicts various ALN2 configurations.

[0069] FIGS. 33A-G depicts a STAT5 comparison of STAT5 phosphorylation by bi-valent and bi-specific CD8 VHH targeted ALN2's compared to the mono-valent counterparts.

[0070] FIGS. 34A-E depicts STAT5 phosphorylation ALN2's in different formats in CD8⁺ and Treg PBMC subpopulations.

[0071] FIGS. 35A-D show that single-peptide ALN2 induced pSTAT5 in CD8+ compared to Treg PBMC subpopulations.

[0072] FIGS. 36A-M depict STAT5 phosphorylation in CD8⁺ and CD8− PBMC lymphocyte populations by CD8 VHH-Fc-IL-2 and T3 O-glycosylation variants thereof.

[0073] FIGS. 37A-D show STAT5 phosphorylation by mouse CD8 targeted alpha:beta ALN2 variants in CD8⁺ and Treg primary mouse splenocytes.

[0074] FIG. 38 depicts tumor growth (in mm³) of animals treated with buffer, Fc-ALN2, or CD8-Fc-ALN2 in the MC38 and CT26 syngeneic mouse models for colon carcinoma.

[0075] FIG. 39 shows the effect of CD8-Fc-ALN2 and anti-PD-1 co-treatment in the MC38 and CT26 mouse models.

[0076] FIGS. 40A-D show STAT5 phosphorylation by CD8 targeted Fc gamma common Q126 mutants in CD8 positive PBMCs.

[0077] FIGS. 41A-S depict sensorgrams of binding of CD8-Fc-IL-2 and Q126 mutants thereof fusion proteins to biotinylated CD25 in BLI.

[0078] FIGS. 42A-D show pSTAT5 phosphorylation by alpha:gamma mutants in CD8⁺ and Treg PBMC subpopulations of three different donors.

[0079] FIGS. 43A-D depict beta:gamma ALN2 STAT5 phosphorylation of ‘resting’ or TransAct activated CD8⁺ or Treg PBMC subpopulations.

[0080] FIG. 44 shows the effect of CD8-Fc-ALN2 (12.5 μg), Fc-ALN2 (10.7 μg) or Fc-IL2 (10.7 μg) on T cell activation 1 day after single dose.

[0081] FIG. 45 depicts the effect of CD8-Fc-ALN2 (12.5 μg), Fc-ALN2 (10.7 μg) or Fc-IL2 (10.7 μg) with and without anti-PD-1 Ab co-treatment on T cell activation 7 days after two doses.

[0082] FIG. 46 shows the effect of CD8-Fc-ALN2 (25 μg), Fc-ALN2 (21.4 μg) or Fc-IL2 (21.4 μg) on T cell activation 3 days after a single dose.

[0083] FIG. 47 depicts the effect of three injections of 12.5 μg CD8-Fc-ALN2 and anti-PD-1 Ab, compared to wild type Fc-IL2, 1 in the A20 mouse model.

[0084] FIG. 48 shows the effect of three doses of 12.5 μg CD8-Fc-ALN2, compared to equimolar Fc-ALN2 treatments in the B16F10 mouse model

[0085] FIG. 49 depicts the effect of two injections of 12.5 μg CD8-Fc-ALN2, compared to equimolar Fc-ALN2 treatment in the Panc02 mouse model.

[0086] FIG. 50 depicts STAT5 phosphorylation in mouse splenocytes (singlet population) comparing wild type IL2, PD-L1 targeted, and untargeted ALN2.

[0087] FIG. 51 shows the effect of three doses of 12.5 μg CD8-Fc-ALN2 and anti-PD-1 Ab, compared to equimolar Fc-ALN2 treatments in the MC38 mouse model.

[0088] FIG. 52 depicts the effect of three doses of 12.5 μg TNCA1-Fc-ALN2 or equivalent dose of untargeted ALN2 without or with anti-PD-1 Ab co-treatment in the MC38 mouse model.

[0089] FIG. 53 shows STAT5 phosphorylation by mouse CD8, or NKp46, or bispecific targeted alpha:beta ALN2 variants in CD8 and NK primary mouse splenocytes compared to untargeted or wild type IL-2.

[0090] FIG. 54 depicts CD25 (left) and PD-1 (right) up-regulation by ALN2 variants R38A_F42K_D20E (upper) and R38A_F42K_N88G (lower) in three PBMC donors. Data are plotted as means±SEM.

[0091] FIG. 55 shows the effect of hCD8-Fc-ALN2 on human T cell activation in human immune system (HIS) mice 45 min after 1 treatment (5 μg).

[0092] FIG. 56 depicts CD25 up-regulation in primary mouse splenocytes by mouse CD8 targeted or untargeted ALN2 variants with different loss-of-function beta mutations.

[0093] FIG. 57 shows the effect of treatment on days 6 and 9 with 12.5 μg N88G- or D20E-based CD8-Fc-ALN2 or equimolar untargeted ALN2s in the MC38 mouse model.

[0094] FIG. 58 depicts STAT5 phosphorylation in primary mouse splenocytes by ALN2 variants with different loss-of-function gamma mutations.

[0095] FIG. 59 shows the effect of three doses of 12.5 or 4.17 μg CD8-Fc-ALN2 alpha:gamma mutation combination in the MC38 mouse model and compared to equimolar dosing of untargeted Fc-ALN.

[0096] FIG. 60 shows the effect of three doses of 4.17 or 1.4 μg CD8-Fc-ALN2 beta:gamma mutation combination in the MC38 mouse model and compared to equimolar dosing of untargeted Fc-ALN.

[0097] FIG. 61 depicts signaling of D20 ALN2 variants in HEK-Blue CD8 vs HEK-Blue NKp46 cells.

[0098] FIG. 62 depicts signaling of N88 ALN2 variants in HEK-Blue CD8 vs HEK-Blue NKp46 cells.

### DETAILED DESCRIPTION

[0099] The present technology is based, in part, on the discovery that targeted chimeric proteins or protein complexes, including Fc-based chimeric protein complexes, that include a modified IL-2 exhibit beneficial therapeutic properties and reduced side effects. For example, the chimeric proteins of the present technology are highly active and/or long-acting while eliciting minimal side effects. The present technology provides pharmaceutical compositions comprising the chimeric proteins and their use in the treatment of various diseases.

[0100] In some embodiments, the chimeric protein or protein complexes having modified IL-2 may favor attenuated activation of CD8⁺ T cells, Thelp cells, or NK cells (which can provide an anti-tumor effect), which primarily express IL-2 receptors β and γ, and disfavor T_{regs} (which can provide an immune suppressive, pro-tumor effect), which have IL-2 receptors α, β, and γ. Further, in some embodiments, the preferences for IL-2RB and/or IL-2Rγ over IL-2Rα avoid IL-2 side effects such as pulmonary edema and/or vascular leak syndrome (VLS). Also, IL-2-based chimeras are useful for the treatment of diseases (e.g., autoimmune disease), for instance when the modified IL-2 is antagonistic (e.g. natural antagonistic activity or antagonistic activity that is the result of one or more mutations, see, e.g., WO 2015/007520, the entire contents of which are hereby incorporated by reference) at IL-2Rβ and/or IL-2Rγ. For instance, the present constructs may favor attenuated suppression of CD8⁺ T cells (and therefore dampen the immune response), which have IL-2 receptors β and γ and disfavor T_{regs} which have IL-2 receptors α, β, and γ. Alternatively, in some embodiments, the chimeras bearing modified IL-2 favor the agonistic activation of T_{regs}, and therefore immune suppression, and disfavor activation of CD8⁺ T cells. For instance, these constructs find use in the treatment of diseases or diseases that would benefit from immune suppression, e.g., autoimmune disorders.

[0101] In some embodiments, the chimeric protein has targeting moieties as described herein directed to CD8⁺ T cells as well as a modified IL-2 having reduced affinity and/or activity for IL-2RB and/or IL-2Rγ and/or substantially reduced or ablated affinity and/or activity for IL-2Rα. In some embodiments, these constructs provide targeted CD8⁺ T cell activity and are generally inactive (or have substantially reduced activity) towards Treg cells. In some embodiments, such constructs have enhanced immune stimulatory effect compared to wild type IL-2 (e.g., without wishing to be bound by theory, by not stimulating T_{regs}), whilst eliminating or reducing the systemic side effects and/or toxicity associated with wild type IL-2 and modified IL-2 proteins constructs that preferentially target IL-2Rβγ but not in a cell-selective, targeted and conditional manner, such as described in this invention.

[0102] In some embodiments, the present invention relates to a chimeric protein or an Fc-based chimeric protein complex comprising a polypeptide having an amino acid sequence having at least 90%, or at least 95%, or at least 96%, or at least 97%, or at least 98%, or at least 99% identity with any one of SEQ ID NOs: 290-449, 478-495, or 501-531. In further embodiments, the chimeric protein or Fc-based chimeric protein complex comprises a polypeptide having an amino acid sequence constructed in one or more of Examples 1-25.

### Modified IL-2

[0103] In one aspect, the present technology provides a chimeric protein that includes a modified IL-2. In various embodiments, the chimeric protein of the present technology comprises a modified IL-2 as a signaling agent. In various embodiments, the modified IL-2 signaling agent encompasses functional derivatives, analogs, precursors, isoforms, splice variants, or fragments of the modified IL-2. In some embodiments, the modified IL-2 encompasses mutations and/or modifications to SEQ ID NO: 1, which is the amino acid sequence of wild type IL-2. In some embodiments, the modified IL-2 has a reduced binding affinity for its target receptor.

[0104] In some embodiments, the modified IL-2 signaling agent has reduced affinity and/or activity for IL-2Rα and/or IL-2Rβ and/or IL-2Rγ. In some embodiments, the modified IL-2 has reduced affinity and/or activity for IL-2Rβ and/or IL-2Rγ. In some embodiments, the modified IL-2 has substantially reduced or ablated affinity and/or activity for IL-2Rα. Such embodiments may be relevant for treatment of cancer, for instance when the modified IL-2 is agonistic at IL-2Rβγ.

[0105] In embodiments, the IL-2 has one or more mutations or modifications that biases it away from an IL-2R having an a chain and one or more attenuating mutations that reduces the activity or affinity of the IL-2 in a restorable manner at an IL-2R having only the βγ chain.

[0106] In embodiments, the IL-2 has one or more mutations or modifications that biases it away from an IL-2R having only the βγ chain and an attenuating mutation that reduces the activity or affinity of the IL-2 in a restorable manner at an IL-2R having an a chain.

[0107] In some embodiments, the IL-2 has one or more mutations or modifications: one or more mutations or modifications that reduce or ablate the activity or affinity of the modified IL-2 for an IL-2Rα chain and/or one or more mutations or modifications that reduce the activity or affinity of the modified IL-2 for an IL-2Rβγ complex. In some embodiments, the reduced activity or affinity of the modified IL-2 for the IL-2Rα chain is restorable by induced proximity at/to a target (e.g., a cell) through a targeting moiety disclosed herein. In some embodiments, the mutation or modification that ablates the activity or affinity of the modified IL-2 for the IL-2Rα chain is not restorable by induced proximity at/to a target (e.g., a cell) through a targeting moiety. In some embodiments, the reduced activity or affinity of the modified IL-2 for the IL-2Rβγ complex is restorable by induced proximity at/to a target (e.g., a cell) through a targeting moiety disclosed herein. In some embodiments, the one or more mutations in reduce the activity or affinity of the modified IL-2 for an IL-2Rα chain and IL-2Rβγ complex, respectively, are both restorable by induced proximity at/to a target (e.g., a cell) through a targeting moiety disclosed herein.

[0108] In embodiments, the IL-2 has one or more mutations or modifications: one or more mutations or modifications that substantially ablate the activity or affinity of the modified IL-2 for an IL-2R α chain and/or one or more mutations or modifications that reduce the activity or affinity of the modified IL-2 for IL-2R lacking an a chain, such reduced activity or affinity being restorable by induced proximity at/to a target (e.g., a cell) through a targeting moiety and such IL-2 being substantially inactive at an IL-2R on cells that do not express a target for the targeting moiety or substantially inactive, compared to wild type IL-2, at IL-2R comprising the alpha chain when contacting cells that express the target for the targeting moiety, while being active at IL-2R lacking an a chain and/or cells that express the target for the targeting moiety. In embodiments, the activity or affinity from mutation or modification is about 3- or about 5-, or about 10-, or about 30-, or about 100-, or about 300-, or about 500-, or about 1000-fold reduced as compared to the activity or affinity from a different mutation or modification.

[0109] In embodiments, the IL-2 has one or more mutations or modifications: one or more mutations or modifications that reduce the activity or affinity of the modified IL-2 for IL-2Rαβγ and/or one or more mutations or modifications that reduce the activity or affinity of the modified IL-2 for IL-2Rα, such reduced activity or affinity being restorable by induced proximity at/to a target (e.g., a cell) through a targeting moiety.

[0110] In embodiments, the IL-2 has one or more mutations or modifications: one or more mutations or modifications that reduce the activity or affinity of the modified IL-2 for IL-2Rαβγ and/or one or more mutations or modifications that reduce the activity or affinity of the modified IL-2 for IL-2Rβγ, such reduced activity or affinity being restorable by induced proximity at/to a target (e.g., a cell) through a targeting moiety and such IL-2 being substantially inactive at an IL-2R on cells that do not express a target for the targeting moiety or substantially inactive at IL-2Rαβγ, compared to wild type IL-2, when contacting cells that express the target for the targeting moiety, while being active at IL-2Rβγ and/or cells that express the target for the targeting moiety.

[0111] In embodiments, the IL-2 has selective (e.g., biased for and/or strongly favored) action at IL-2Rβγ (and not IL-2Rαβγ) but the activity at IL-2Rβγ is attenuated by further mutations or modifications to render the IL-2 safe for systemic use (e.g. the IL-2 is active at IL-2Rβγ predominantly at the site of therapeutic action, to which it is directed via the targeting moiety).

[0112] In embodiments, the IL-2 has selective (e.g., biased for and/or strongly favored) action at NK cells and/or CD8⁺ cells and not substantially at Treg cells and the selective (e.g., biased for and/or strongly favored) action at NK cells and/or CD8⁺ cells is controlled by targeting to reduce or eliminate systemic side effects. For instance, the present chimeric protein is, in some embodiments, not only directed to cells that have an immune stimulation effect but also done so in a controllable way that focuses IL-2 action at the site of desired therapy. As described herein, such chimeric proteins find use, in embodiments, in safely stimulating the immune system for an anti-cancer effect. In some embodiments, the IL-2 has one or more mutations or modifications: one or more mutations or modifications that reduce the activity or affinity of the modified IL-2 for an IL-2R lacking an a chain and/or one or more mutations or modifications reduce the activity or affinity of the modified IL-2 for an IL-2R comprising an a chain, such mutation or modification being an attenuation mutation for which the activity or affinity is restorable by induced proximity at/to a target (e.g., a cell) through a targeting moiety.

[0113] In embodiments, the IL-2 has one or more mutations or modifications: one or more mutations or modifications that reduce the activity or affinity of the modified IL-2 for an IL-2R lacking an a chain and/or one or more mutations or modifications that reduce the activity or affinity of the modified IL-2 for IL-2R comprising an a chain, such reduced activity or affinity being restorable by induced proximity at/to a target (e.g., a cell) through a targeting moiety and such IL-2 being substantially inactive at an IL-2R on cells that do not express a target for the targeting moiety or substantially inactive, compared to wild type IL-2, at IL-2R lacking an a chain when contacting cells that express the target for the targeting moiety, while being active at an IL-2R comprising an a chain and/or cells that express the target for the targeting moiety.

[0114] In some embodiments, the IL-2 has one or more mutations or modifications: one or more mutations or modifications that reduce the activity or affinity of the modified IL-2 for IL-2Rβγ and/or one or more mutations or modifications that reduce the activity or affinity of the modified IL-2 for IL-2Rα such mutation or modification being an attenuation mutation for which the activity or affinity is restorable by induced proximity at/to a target (e.g., a cell) through a targeting moiety.

[0115] In embodiments, the IL-2 has one or more mutations or modifications: one or more mutations or modifications that reduce the activity or affinity of the modified IL-2 for IL-2Rβγ and/or one or more mutations or modifications that reduce the activity or affinity of the modified IL-2 for IL-2Rαβγ, such reduced activity or affinity being restorable by induced proximity at/to a target (e.g., a cell) through a targeting moiety.

[0116] In embodiments, the IL-2 has one or more mutations or modifications: one or more mutations or modifications that reduce the activity or affinity of the modified IL-2 for IL-2Rβγ and/or one or more mutations or modifications that reduce the activity or affinity of the modified IL-2 for IL-2Rαβγ, such reduced activity or affinity being restorable by induced proximity at/to a target (e.g., a cell) through a targeting moiety and such IL-2 being substantially inactive at an IL-2R on cells that do not express a target for the targeting moiety or substantially inactive at IL-2Rβγ, compared to wild type IL-2, when contacting cells that express the target for the targeting moiety, while being active at IL-2Rαβγ and/or cells that express the target for the targeting moiety.

[0117] In embodiments, the modified IL-2 has selective (e.g., biased for and/or strongly favored) action at IL-2Rαβγ (and not IL-2Rβγ) but the activity at IL-2Rαβγ is attenuated by further mutations or modifications to render the IL-2 safe for systemic use (e.g. the IL-2 is active at IL-2Rαβγ predominantly at the site of therapeutic action, to which it is directed via the targeting moiety).

[0118] In some embodiments, the IL-2 has one or more mutations or modifications that reduce the activity or affinity of the modified IL-2 for an IL-2Rβγ chain and normal activity or affinity to an IL-2Rα chain, wherein the reduced activity or affinity of the modified IL-2 for the IL-2Rβγ chain is restorable by induced proximity at/to a target (e.g., a cell) through a targeting moiety.

[0119] In embodiments, the IL-2 has one or more mutations or modifications that reduce the activity or affinity of the modified IL-2 for IL-2Rα and normal activity or affinity to an IL-2Rβγ chain, wherein the reduced activity or affinity of the modified IL-2 for the IL-2Rα chain is restorable by induced proximity at/to a target (e.g., a cell) through a targeting moiety.

[0120] In some embodiments, the IL-2 has one or more mutations or modifications: one or more mutations or modifications that ablate the activity or affinity of the modified IL-2 for an IL-2Rα chain and/or one or more mutations or modifications that reduce the activity or affinity of the modified IL-2 for an IL-2Rβγ chain, wherein the reduced activity or affinity of the modified IL-2 for the IL-2Rβγ chain is restorable by induced proximity at/to a target (e.g., a cell) through a targeting moiety (e.g., a CD8, CD3, or PD-1 targeting moiety) and is useful in mediating a T-cell mediated immune response (e.g., a CD8 T-cell mediated immune response).

[0121] In some embodiments, the IL-2 has one or more mutations or modifications: one or more mutations or modifications that reduce the activity or affinity of the modified IL-2 for an IL-2Rα chain and/or one or more mutations or modifications that reduce the activity or affinity of the modified IL-2 for an IL-2Rβγ chain, wherein the reduced activity or affinity of the modified IL-2 for the IL-2Rα and/or the IL-2Rβγ chain is restorable by induced proximity at/to a target (e.g., a cell) through a targeting moiety (e.g., a CD8, CD3, or PD-1 targeting moiety) and is useful in mediating a T-cell mediated immune response (e.g., a CD8 T-cell mediated immune response).

[0122] In some embodiments, the IL-2 has one or more mutations or modifications: one or more mutations or modifications that reduce the activity or affinity of the modified IL-2 for an IL-2Rα chain and/or one or more mutations or modifications that reduce the activity or affinity of the modified IL-2 for an IL-2Rβγ chain, wherein the reduced activity or affinity of the modified IL-2 for the IL-2Rα chain and/or IL-2Rβγ chain is restorable by induced proximity at/to a target (e.g., a cell) through a targeting moiety and is useful in mediating a Treg response.

[0123] In some embodiments, the IL-2 has one or more mutations or modifications: one or more mutations or modifications that ablate the activity or affinity of the modified IL-2 for an IL-2Rα chain and/or one or more mutations or modifications that reduce the activity or affinity of the modified IL-2 for an IL-2Rβγ chain, wherein the reduced activity or affinity of the modified IL-2 for the IL-2Rβγ chain is restorable by induced proximity at/to a target (e.g., a cell) through a targeting moiety and is useful in mediating a Treg response.

[0124] In some embodiments, the IL-2 has one or more mutations or modifications that reduce the activity or affinity of the modified IL-2 for an IL-2Rβγ chain and normal activity or affinity to an IL-2Rα chain, wherein the reduced activity or affinity of the modified IL-2 for the IL-2Rβγ chain is restorable by induced proximity at/to a target (e.g., a cell) through a targeting moiety and is useful in mediating a Treg response.

[0125] In embodiments, the IL-2 has selective (e.g., biased for and/or strongly favored) action at Treg cells and not substantially at NK cells and/or CD8⁺ cells and the selective (e.g., biased for and/or strongly favored) action at Treg cells is controlled by targeting to reduce or eliminate systemic side effects. For instance, the present chimeric protein is, in some embodiments, not only directed to cells that have an immune inhibition effect but also done so in a controllable way that focuses IL-2 action at the site of desired therapy. As described herein, such chimeric proteins find use, in embodiments, in safely stimulating the immune system for an anti-autoimmune effect.

[0126] In some embodiments, the modified IL-2 signaling agent is modified wild type IL-2. Wild type IL-2 has the amino acid sequence of:

(SEQ ID NO: 1)
[sequence omitted]

[0127] In some embodiments, the modified IL-2 signaling agent comprises: (i) a mutation selected from D20E, D20F, D20G, D20H, D20I, D20K, D20L, and D20V; or (ii) a mutation selected from N88G, N88E, N88K, N88Q, and N88V; or (iii) a mutation selected from Q126G, Q126A, Q126E, Q126F, Q126H, Q126I, Q126K, Q126L, Q126N, Q126P, Q126R, Q126S, Q126T, Q126V, Q126W, and Q126Y; or (iv) a mutation selected from (i) and (iii) or a mutation selected from (ii) and (iii); or (v) one or more mutations selected from: R38A/F42K/N88G/C125A, F42K/C125A, D20E/C125A, D20F/C125A, D20G/C125A, D20H/C125A, D20I/C125A, D20K/C125A, D20L/C125A, D20N/C125A, D20S/C125A, D20T/C125A, D20V/C125A, N88A/C125A, N88D/C125A, N88G/C125A, N88E/C125A, N88H/C125A, N88I/C125A, N88K/C125A, N88Q/C125A, N88R/C125A, N88T/C125A, N88V/C125A, D20E/R38A/F42K, D20E/R38A/F42K/C125A, D20V/R38A/F42K, D20V/R38A/F42K/C125A, R38A/F42Y/E62A/C125A, R38A/F42Y/Y45A/E62A, F42Y/Y45A/L72G, R38A/F42Y/Y45A/E62A/C125A, F42Y/Y45A/L72G/C125A, R38A/F42K/N88G, R38A/F42K/Q126G, R38A/F42K/Q126I, R38A/F42K/Q126Y, R38A/F42K/Q126G/C125A, R38A/F42K/Q126I/C125A, R38A/F42K/Q126Y/C125A, R38A/F42K/E62A/N88G, and R38A/F42K/E62A/N88G/C125A.

[0128] In some embodiments, the modified IL-2 signaling agent comprises one or more mutations at an amino acid residue selected from R38, F42, E62, C125, Y45, L72, D20, N88, and Q126 relative to SEQ ID NO: 1. In such embodiments, the modified IL-2 signaling agent comprises one or more mutations selected from R38A, F42K, F42Y, E62A, C125A, Y45A, L72G, D20E, D20F, D20G, D20H, D20I, D20K, D20L, D20N, D20V, N88G, N88E, N88I, N88K, N88Q, N88R, N88V, R38A/F42Y/E62A/C125A, F42Y/Y45A/L72G/C125A, F42K/C125A, R38A/F42K/C125A, D20E/C125A, D20G/C125A, D20S/C125A, D20T/C125A, D20V/C125A, N88A/C125A, N88D/C125A, N88G/C125A, N88H/C125A, N88Q/C125A, N88T/C125A, D20E/R38A/F42K/C125A, D20V/R38A/F42K/C125A, R38A/F42K/N88A/C125A, R38A/F42K/N88G/C125A, Q126A, Q126E, Q126F, Q126G, Q126H, Q126I, Q126K, Q126L, Q126N, Q126P, Q126R, Q126S, Q126T, Q126V, Q126W, and Q126Y, relative to SEQ ID NO: 1.

[0129] In various embodiments, the modified IL-2 signaling agent comprises one or more mutations selected from D20V, D20E, N88G, F42K/C125A, D20E/C125A, D20G/C125A, D20S/C125A, D20T/C125A, D20V/C125A, N88A/C125A, N88D/C125A, N88G/C125A, N88H/C125A, N88Q/C125A, N88T/C125A, D20E/R38A/F42K, D20E/R38A/F42K/C125A, D20V/R38A/F42K, D20V/R38A/F42K/C125A, D20V/R38A/F42K/E62A, D20V/R38A/F42K/E62A/C125A, R38A/F42K/N88G, R38A/F42K/N88G/C125A, R38A/F42K/E62A/N88G, R38A/F42K/E62A/N88G/C125A, Q126A, Q126E, Q126F, Q126G, Q126H, Q126I, Q126K, Q126L, Q126N, Q126P, Q126R, Q126S, Q126T, Q126V, Q126W, and Q126Y, relative to SEQ ID NO: 1.

[0130] In particular embodiments, the modified IL-2 signaling agent comprises one or more mutations selected from R38A/F42Y/E62A/C125A, F42Y/Y45A/L72G/C125A, F42K/C125A, D20E/C125A, D20G/C125A, D20S/C125A, D20T/C125A, D20V/C125A, N88A/C125A, N88D/C125A, N88G/C125A, N88H/C125A, N88Q/C125A, N88T/C125A, D20E/R38A/F42K/C125A, D20V/R38A/F42K/C125A, and R38A/F42K/N88G/C125A, relative to SEQ ID NO: 1.

[0131] In some embodiments, the modified IL-2 signaling agent comprises one or more of the mutation combinations selected from those listed in Table 8.

[0132] Without wishing to be bound by theory, it is believed that modified IL-2 agents have reduced affinity for a high-affinity IL-2 receptor (i.e., IL-2Rαβγ) and preserves affinity to the intermediate-affinity IL-2 receptor (i.e., IL-2Rβγ), as compared to the wild-type IL-2.

[0133] Without wishing to be bound by theory, it is further believed that these modified IL-2 agents have reduced affinity for an IL-2 receptor (e.g., IL-2Rβγ), as compared to the wild-type IL-2.

[0134] In some embodiments, the modified IL-2 signaling agent with mutations at R38, F42, Y45, and/or E62 is able to induce an expansion of effector cells including CD8⁺ T cells and NK cells but not Treg cells and/or endothelial cells. In some embodiments, the modified IL-2 signaling agent with mutations at R38, F42, Y45, and/or E62 is less toxic than wildtype IL-2 agents. A chimeric protein comprising the modified IL-2 agent with substantially reduced affinity and/or activity for IL-2Rα may find application in oncology, for example.

[0135] In some embodiments, the modified IL-2 agent has a mutation at amino acid residue D20. For example, the modified IL-2 agent may comprise D20E, D20G, D20S, D20T, or D20V. In some embodiments, the modified IL-2 agent with a mutation at D20 has decreased toxicity as compared to wild type IL-2 agents. In some embodiments, a D20 mutation decreases toxicity by inhibiting binding to and activation of endothelial cells.

[0136] In some embodiments, the modified IL-2 agent has a mutation at amino acids C125. For example, the modified IL-2 agent may comprise the mutation C125A. In some embodiments, the modified IL-2 agent with a mutation at C125 optimize production of such a modified IL-2 agent. In some embodiments, a mutation at C125 promotes stability of such a modified IL-2 agent by removing an unpaired cysteine residue. In such embodiments, the modified IL-2 agent may have substantially reduced affinity and/or activity for IL-2Rα, as described in, for example, Carmenate et al. (2013) The Journal of Immunology, 190:6230-6238, the entire disclosure of which is hereby incorporated by reference.

[0137] In other embodiments, the modified IL-2 agent may have substantially reduced affinity and/or activity for IL-2Rβ, as described in, for example, WO 2016/025385, the entire disclosure of which is hereby incorporated by reference. In such embodiments, the modified IL-2 agent may induce an expansion of Treg cells but not effector cells such as CD8⁺ T cells and NK cells. A chimeric protein comprising the modified IL-2 agent with substantially reduced affinity and/or activity for IL-2Rβ may find application in the treatment of autoimmune disease for example. In some embodiments, the modified IL-2 agent may comprise a mutation at amino acid residue N88. For example, the modified IL-2 agent may comprise N88A, N88D, N88G, N88H, N88Q, or N88T.

[0138] In some embodiments, the modified IL-2 signaling agent comprises a deletion of the Ala at the N-terminus of SEQ ID NO: 1. In some embodiments, the modified IL-2 agent comprises the substitution of a Serine or Alanine for the Cysteine at position 125 of SEQ ID NO: 1. In some embodiments, the modified IL-2 agent comprises a deletion of the Ala at the N-terminus and the substitution of a Serine or Alanine for the Cysteine at position 125 of SEQ ID NO: 1.

[0139] In some embodiments, the modified IL-2 exhibits reduced affinity and/or activity for IL-2Rα and IL2Rβ, optionally wherein the modified IL-2 comprises one or more mutations selected from D20E/R38A/F42K, D20E/R38A/F42K/C125A, D20V/R38A/F42K, D20V/R38A/F42K/C125A, D20V/R38A/F42K/E62A, D20V/R38A/F42K/E62A/C125A, R38A/F42K/N88G, R38A/F42K/N88G/C125A, R38A/F42K/E62A/N88G, and R38A/F42K/E62A/N88G/C125A.

[0140] In some embodiments, the modified IL-2 exhibits reduced affinity and/or activity for IL-2Rα and IL-2Rγ, optionally wherein the modified IL-2 comprises one or more mutations selected from R38A/F42K/Q126G, R38A/F42K/Q126I, and R38A/F42K/Q126Y.

[0141] In some embodiments, the modified IL-2 exhibits reduced affinity and/or activity for IL-2Rβ, optionally wherein the modified IL-2 comprises one or more mutations selected from D20E, D20F, D20G, D20H, D20I, D20K, D20L, D20V, N88G, N88E, N88K, N88Q, N88V, D20E/C125A, D20F/C125A, D20G/C125A, D20H/C125A, D20I/C125A, D20L/C125A, D20K/C125A, D20N/C125A, D20S/C125A, D20T/C125A, D20V/C125A, N88A/C125A, N88D/C125A, N88G/C125A, N88E/C125A, N88H/C125A, N88I/C125A, N88K/C125A, N88Q/C125A, N88R/C125A, N88T/C125A, and N88V/C125A.

[0142] In some embodiments, the modified IL-2 exhibits reduced affinity and/or activity for IL-2Rγ, optionally wherein the modified IL-2 comprises one or more mutations selected from Q126A, Q126E, Q126F, Q126G, Q126H, Q126I, Q126K, Q126L, Q126N, Q126P, Q126R, Q126S, Q126T, Q126V, Q126W, and Q126Y.

[0143] In some embodiments, the modified IL-2 exhibits reduced affinity and/or activity for IL-2Rβγ, optionally wherein the modified IL-2 comprises one or more mutations selected from D20E/Q126A, D20E/Q126D, D20E/Q126E, D20E/Q126F, D20E/Q126G, D20E/Q126H, D20E/Q126I, D20E/Q126K, D20E/Q126L, D20E/Q126M, D20E/Q126N, D20E/Q126P, D20E/Q126R, D20E/Q126S, D20E/Q126T, D20E/Q126V, D20E/Q126W, D20E/Q126Y, D20V/Q126A, D20V/Q126D, D20V/Q126E, D20V/Q126F, D20V/Q126G, D20V/Q126H, D20V/Q126I, D20V/Q126K, D20V/Q126L, D20V/Q126M, D20V/Q126N, D20V/Q126P, D20V/Q126R, D20V/Q126S, D20V/Q126T, D20V/Q126V, D20V/Q126W, D20V/Q126Y, N88A/Q126A, N88A/Q126D, N88A/Q126E, N88A/Q126F, N88A/Q126G, N88A/Q126H, N88A/Q126I, N88A/Q126K, N88A/Q126L, N88A/Q126M, N88A/Q126N, N88A/Q126P, N88A/Q126R, N88A/Q126S, N88A/Q126T, N88A/Q126V, N88A/Q126W, N88A/Q126Y, N88G/Q126A, N88G/Q126D, N88G/Q126E, N88G/Q126F, N88G/Q126G, N88G/Q126H, N88G/Q126I, N88G/Q126K, N88G/Q126L, N88G/Q126M, N88G/Q126N, N88G/Q126P, N88G/Q126R, N88G/Q126S, N88G/Q126T, N88G/Q126V, N88G/Q126W, and N88G/Q126Y. In further embodiments, the modified IL-2 exhibits reduced affinity and/or activity for IL-2Rβγ and exhibits increased selectivity toward activated CD8 cells.

### Neoleukin

[0144] In some embodiments, the modified IL-2 signaling agent is modified neoleukin, which comprises the amino acid sequence of:

(SEQ ID NO: 2)
PKKKIQLHAEHALYDALMILNIVKTNSPPAEEKLEDYAFNFELILEEIAR
LFESGDQKDEAEKAKRMKEWMKRIKTTASEDEQEEMANAIITILQSWIF
S.

[0145] In such embodiments, the modified IL-2 signaling agent comprising SEQ ID NO: 2 has one or more mutations at amino acid residues D15 and/or N40. For example, in some embodiments, the modified IL-2 signaling agent comprising SEQ ID NO: 2 comprises D15T, D15H, N401, N40G, or N40R.

[0146] In some embodiments, the modified IL-2 signaling agent comprises an amino acid sequence that has at least about 60%, or at least about 61%, or at least about 62%, or at least about 63%, or at least about 64%, or at least about 65%, or at least about 66%, or at least about 67%, or at least about 68%, or at least about 69%, or at least about 70%, or at least about 71%, or at least about 72%, or at least about 73%, or at least about 74%, or at least about 75%, or at least about 76%, or at least about 77%, or at least about 78%, or at least about 79%, or at least about 80%, or at least about 81%, or at least about 82%, or at least about 83%, or at least about 84%, or at least about 85%, or at least about 86%, or at least about 87%, or at least about 88%, or at least about 89%, or at least about 90%, or at least about 91%, or at least about 92%, or at least about 93%, or at least about 94%, or at least about 95%, or at least about 96%, or at least about 97%, or at least about 98%, or at least about 99% sequence identity with SEQ ID NOs: 1 or 2 (e.g. about 60%, or about 61%, or about 62%, or about 63%, or about 64%, or about 65%, or about 66%, or about 67%, or about 68%, or about 69%, or about 70%, or about 71%, or about 72%, or about 73%, or about 74%, or about 75%, or about 76%, or about 77%, or about 78%, or about 79%, or about 80%, or about 81%, or about 82%, or about 83%, or about 84%, or about 85%, or about 86%, or about 87%, or about 88%, or about 89%, or about 90%, or about 91%, or about 92%, or about 93%, or about 94%, or about 95%, or about 96%, or about 97%, or about 98%, or about 99% sequence identity).

[0147] In various embodiments, the modified IL-2 is modified to have one or more mutations. In some embodiments, the modified IL-2 is modified to have one or more mutations and one or more modifications (e.g., glycosylation). IL-2 contains a threonine O-glycosylation site on position 3 (T3). For example, in some embodiments the modified IL-2-signaling agent comprises a T3 O-glycosylation mutation, wherein the mutation is one of T3A, T3F, T3H, T3L,

[0148] T3V, and T3Y. In some embodiments, the modified IL-2-signaling agent comprises a T3 O-glycosylation deletion mutation, wherein the first 3, 4, 5, 6, 7, or 8 residues of the modified IL-2 sequence are deleted.

[0149] In some embodiments, the one or more amino acid mutations may be independently selected from substitutions, insertions, deletions, and truncations.

[0150] In some embodiments, the amino acid mutations are amino acid substitutions, and may include conservative and/or non-conservative substitutions.

[0151] “Conservative substitutions” may be made, for instance, on the basis of similarity in polarity, charge, size, solubility, hydrophobicity, hydrophilicity, and/or the amphipathic nature of the amino acid residues involved. The 20 naturally occurring amino acids can be grouped into the following six standard amino acid groups: (1) hydrophobic: Met, Ala, Val, Leu, Ile; (2) neutral hydrophilic: Cys, Ser, Thr; Asn, Gln; (3) acidic: Asp, Glu; (4) basic: His, Lys, Arg; (5) residues that influence chain orientation: Gly, Pro; and (6) aromatic: Trp, Tyr, Phe.

[0152] As used herein, “conservative substitutions” are defined as exchanges of an amino acid by another amino acid listed within the same group of the six standard amino acid groups shown above. For example, the exchange of Asp by Glu retains one negative charge in the so modified polypeptide. In addition, glycine and proline may be substituted for one another based on their ability to disrupt α-helices.

[0153] As used herein, “non-conservative substitutions” are defined as exchanges of an amino acid by another amino acid listed in a different group of the six standard amino acid groups (1) to (6) shown above.

[0154] In various embodiments, the substitutions may also include non-classical amino acids (e.g. selenocysteine, pyrrolysine, N-formylmethionine β-alanine, GABA and δ-Aminolevulinic acid, 4-aminobenzoic acid (PABA), D-isomers of the common amino acids, 2,4-diaminobutyric acid, α-amino isobutyric acid, 4-aminobutyric acid, Abu, 2-amino butyric acid, γ-Abu, ε-Ahx, 6-amino hexanoic acid, Aib, 2-amino isobutyric acid, 3-amino propionic acid, ornithine, norleucine, norvaline, hydroxyproline, sarcosme, citrulline, homocitrulline, cysteic acid, t-butylglycine, t-butylalanine, phenylglycine, cyclohexylalanine, β-alanine, fluoro-amino acids, designer amino acids such as β methyl amino acids, C α-methyl amino acids, N α-methyl amino acids, and amino acid analogs in general).

[0155] In some embodiments, the mutations allow for the modified IL-2 to have one or more of attenuated activity, such as one or more of reduced binding affinity, reduced endogenous activity, and reduced specific bioactivity, relative to unmutated IL-2, e.g., the wild type form of IL-2 (e.g., SEQ ID NO: 1). For instance, the one or more of attenuated activity, such as reduced binding affinity, reduced endogenous activity, and reduced specific bioactivity, relative to unmutated IL-2, e.g., the wild type form of IL-2 (e.g., SEQ ID NO: 1), may be at a receptor such as IL-2Rαβγ. Consequentially, in various embodiments, the mutations allow for the modified IL-2 to have reduced systemic toxicity, reduced side effects, and reduced off-target effects relative to unmutated IL-2, e.g., the wild type form of IL-2.

[0156] In some embodiments, the modified IL-2 is modified to have one or more mutations that reduces its binding affinity or activity at a therapeutic or target receptor. In some embodiments, the activity provided by the modified IL-2 is agonism at the therapeutic or target receptor (e.g. activation of a cellular effect at a site of therapy) or antagonism at the therapeutic or target receptor (e.g., reduced or ablated activation of a cellular effect at a site of therapy). For example, the modified IL-2 may activate the therapeutic or target receptor. In such embodiments, the mutation results in the modified IL-2 to have reduced activating activity at the therapeutic or target receptor.

[0157] In some embodiments, the reduced affinity or activity at the therapeutic or target receptor is restorable by attachment with a targeting moiety. In other embodiments, the reduced affinity or activity at the therapeutic or target receptor is not substantially restorable by attachment with the targeting moiety. In various embodiments, the chimeric proteins of the present technology reduce off-target effects because the modified IL-2 has mutations that weaken binding affinity or activity at a therapeutic or target receptor. In various embodiments, this reduces side effects observed with, for example, the wild type IL-2. In various embodiments, the modified IL-2 is substantially inactive en route to the site of therapeutic activity and has its effect substantially on specifically targeted cell types which greatly reduces undesired side effects.

[0158] In various embodiments, the modified IL-2 has one or more mutations that cause the modified IL-2 to have attenuated or reduced affinity, e.g. binding (e.g. K_{D}) and/or activation (measurable as, for example, KA and/or EC50) for one or more therapeutic receptors. In various embodiments, the reduced affinity at the therapeutic receptor allows for attenuation of activity and/or signaling from the therapeutic receptor.

[0159] In various embodiments, the modified IL-2 has about 1%, or about 3%, about 5%, about 10%, about 15%, about 20%, about 25%, about 30%, about 35%, about 40%, about 45%, about 50%, about 60%, about 65%, about 70%, about 75%, about 80%, about 85%, about 90%, about 95%, or about 10%-20%, about 20%-40%, about 50%, about 40%-60%, about 60%-80%, about 80%-100% of the affinity for the therapeutic or target receptor (e.g., IL-2Rαβγ or IL-2Rβγ or any one of their subunits IL-2Rα, IL-2Rβ, and/or IL-2Rγ) relative to the wild type IL-2. In some embodiments, the binding affinity is at least about 2-fold lower, about 3-fold lower, about 4-fold lower, about 5-fold lower, about 6-fold lower, about 7-fold lower, about 8-fold lower, about 9-fold lower, at least about 10-fold lower, at least about 15-fold lower, at least about 20-fold lower, at least about 25-fold lower, at least about 30-fold lower, at least about 35-fold lower, at least about 40-fold lower, at least about 45-fold lower, at least about 50-fold lower, at least about 100-fold lower, at least about 150-fold lower, or about 10-50-fold lower, about 50-100-fold lower, about 100-150-fold lower, about 150-200-fold lower, or more than 200-fold lower relative to the wild type IL-2.

[0160] Receptor binding activity may be measured using methods known in the art. For example, affinity and/or binding activity may be assessed by Scatchard plot analysis and computer-fitting of binding data (e.g. Scatchard, The attractions of proteins for small molecules and ions. Ann NY Acad Sci 51: 660-672, 1949) or by reflectometric interference spectroscopy under flow through conditions, as described by Brecht et al. Biosens Bioelectron 1993; 8:387-392, the entire contents of all of which are hereby incorporated by reference. In some embodiments, receptor binding activity is measured by bio-layer interferometry (BLI).

[0161] In various embodiments, the attenuated activity at the therapeutic or target receptor, the weakened affinity at the therapeutic or target receptor is restorable by attachment with a targeting moiety, having high affinity for an antigen at the site of therapeutic activity (e.g. an antibody or antibody format described herein). The targeting is realized by linking the modified IL-2 to a targeting moiety. In an embodiment, the modified IL-2 is linked to a targeting moiety through its amino-terminus. In another embodiment, the modified IL-2 is linked to a targeting moiety through its carboxy-terminus. In this way, the present chimeric proteins provide, in some embodiments, localized, on-target, and controlled therapeutic action at the therapeutic or target receptor.

[0162] In various embodiments, the activity of the modified IL-2 at a therapeutic or target receptor, is enhanced by attachment with a targeting moiety, having high affinity for an antigen at the site of therapeutic activity (e.g. an antibody or antibody format described herein). The targeting is realized by linking the modified IL-2 to a targeting moiety. In an embodiment, the modified IL-2 is linked to a targeting moiety through its amino-terminus. In another embodiment, the modified IL-2 is linked to a targeting moiety through its carboxy-terminus. In this way, the present chimeric proteins provide, in some embodiments, localized, on-target, and controlled therapeutic action at the therapeutic or target receptor.

### Therapeutic Agents Comprising the Interleukin or a Variant Thereof

[0163] In embodiments, the present invention provides chimeric proteins or protein complexes comprising one or more targeting moieties that bind to one or more of the following targets: CD8, CTLA4, CD3, CD4, DNAM-1, Nrp1 (neurophilin), TNFR1, TNFR2, GITR, ICOS, CD20, CD70, Clec9a, NKp46, PD-1, PD-L1, PD-L2, SIRP1a, FAP, XCR1, tenascin, and ECM proteins.

### Targeting Moiety Cellular Recruitment

[0164] In various embodiments, the chimeric proteins or chimeric protein complexes, such as Fc-based chimeric protein complexes of the present invention additionally comprise one or more targeting moieties having recognition domains which specifically bind to a target (e.g. antigen, receptor) of interest. In some embodiments, the chimeric protein or chimeric protein complexes, such as Fc-based chimeric protein complexes may comprise two, three, four, five, six, seven, eight, nine, ten or more targeting moieties. In illustrative embodiments, the chimeric proteins or chimeric protein complexes, such as Fc-based chimeric protein complexes of the invention comprise two or more targeting moieties. In such embodiments, the chimeric proteins or chimeric protein complexes, such as Fc-based chimeric protein complexes can target two different cells (e.g. to make a synapse) or the same cell (e.g. to get a more concentrated signaling agent effect).

[0165] In some embodiments, the target (e.g. antigen, receptor) of interest is directed against an immune cell and/or organ cells, and/or tissue cells.

[0166] In various embodiments, the target (e.g. antigen, receptor) of interest can be found on one or more immune cells, which can include, without limitation, T cells, cytotoxic T lymphocytes, T helper cells, natural killer (NK) cells, natural killer T (NKT) cells, anti-tumor or tumor-associated macrophages (e.g. M1 or M2 macrophages), B cells, Breg cells, dendritic cells, or subsets thereof. In some embodiments, the recognition domains specifically bind to a target (e.g. antigen, receptor) of interest and effectively, directly or indirectly, recruit one of more immune cells. In some embodiments, the target (e.g. antigen, receptor) of interest can be found on one or more tumor cells. In some embodiments, the target (e.g. antigen, receptor) of interest can be found on or in the tumor neovasculature. In some embodiments, the present chimeric proteins or chimeric protein complexes, such as Fc-based chimeric protein complexes may directly or indirectly recruit an immune cell, e.g., in some embodiments, to a therapeutic site (e.g. a locus with one or more disease cell or cell to be modulated for a therapeutic effect). In some embodiments, the present chimeric proteins or chimeric protein complexes such as Fc-based chimeric protein complexes may directly or indirectly recruit an immune cell, e.g. an immune cell that can kill and/or suppress a tumor cell, to a site of action (such as, by way of non-limiting example, the tumor microenvironment).

[0167] In various embodiments, the chimeric proteins or chimeric protein complexes such as Fc-based chimeric protein complexes have targeting moieties having recognition domains which specifically bind to a target (e.g. antigen, receptor) which is part of a non-cellular structure. In some embodiments, the antigen or receptor is not an integral component of an intact cell or cellular structure. In some embodiments, the antigen or receptor is an extracellular antigen or receptor. In some embodiments, the target is a non-proteinaceous, non-cellular marker, including, without limitation, nucleic acids, inclusive of DNA or RNA, such as, for example, DNA released from necrotic tumor cells or extracellular deposits such as cholesterol.

[0168] In some embodiments, the target (e.g. antigen, receptor) of interest is part of the non-cellular component of the stroma or the extracellular matrix (ECM) or the markers associated therewith. As used herein, stroma refers to the connective and supportive framework of a tissue or organ. Stroma may include a compilation of cells such as fibroblasts/myofibroblasts, glial, epithelia, fat, immune, vascular, smooth muscle, and immune cells along with the extracellular matrix (ECM) and extracellular molecules. In various embodiments, the target (e.g. antigen, receptor) of interest is part of the non-cellular component of the stroma such as the extracellular matrix and extracellular molecules. As used herein, the ECM refers to the non-cellular components present within all tissues and organs. The ECM is composed of a large collection of biochemically distinct components including, without limitation, proteins, glycoproteins, proteoglycans, and polysaccharides. These components of the ECM are usually produced by adjacent cells and secreted into the ECM via exocytosis. Once secreted, the ECM components often aggregate to form a complex network of macromolecules. In various embodiments, the chimeric proteins or chimeric protein complexes such as Fc-based chimeric protein chimeric proteins of the invention comprise a targeting moiety that recognizes a target (e.g., an antigen or receptor or non-proteinaceous molecule) located on any component of the ECM. Illustrative components of the ECM include, without limitation, the proteoglycans, the non-proteoglycan polysaccharides, fibers, and other ECM proteins or ECM non-proteins, e.g. polysaccharides and/or lipids, or ECM associated molecules (e.g. proteins or non-proteins, e.g. polysaccharides, nucleic acids and/or lipids).

[0169] In some embodiments, the targeting moiety recognizes a target (e.g. antigen, receptor) on ECM proteoglycans. Proteoglycans are glycosylated proteins. The basic proteoglycan unit includes a core protein with one or more covalently attached glycosaminoglycan (GAG) chains. Proteoglycans have a net negative charge that attracts positively charged sodium ions (Na+), which attracts water molecules via osmosis, keeping the ECM and resident cells hydrated. Proteoglycans may also help to trap and store growth factors within the ECM. Illustrative proteoglycans that may be targeted by the chimeric proteins or chimeric protein complexes such as Fc-based chimeric protein complexes of the invention include, but are not limited to, heparan sulfate, chondroitin sulfate, and keratan sulfate. In an embodiment, the targeting moiety recognizes a target (e.g. antigen, receptor) on non-proteoglycan polysaccharides such as hyaluronic acid.

[0170] In some embodiments, the targeting moiety recognizes a target (e.g. antigen, receptor) on ECM fibers. ECM fibers include collagen fibers and elastin fibers. In some embodiments, the targeting moiety recognizes one or more epitopes on collagens or collagen fibers. Collagens are the most abundant proteins in the ECM. Collagens are present in the ECM as fibrillar proteins and provide structural support to resident cells. In one or more embodiments, the targeting moiety recognizes and binds to various types of collagens present within the ECM including, without limitation, fibrilar collagens (types I, II, III, V, XI), facit collagens (types IX, XII, XIV), short chain collagens (types VIII, X), basement membrane collagens (type IV), and/or collagen types VI, VII, or XIII. Elastin fibers provide elasticity to tissues, allowing them to stretch when needed and then return to their original state. In some embodiments, the target moiety recognizes one or more epitopes on elastins or elastin fibers.

[0171] In some embodiments, the targeting moiety recognizes one or more ECM proteins including, but not limited to, a tenascin, a fibronectin, a fibrin, a laminin, or a nidogen/entactin.

[0172] In an embodiment, the targeting moiety recognizes and binds to tenascin. The tenascin (TN) family of glycoproteins includes at least four members, tenascin-C, tenascin-R, tenascin-X, and tenascin W. The primary structures of tenascin proteins include several common motifs ordered in the same consecutive sequence: amino-terminal heptad repeats, epidermal growth factor (EGF)-like repeats, fibronectin type III domain repeats, and a carboxyl-terminal fibrinogen-like globular domain. Each protein member is associated with typical variations in the number and nature of EGF-like and fibronectin type III repeats. Isoform variants also exist particularly with respect to tenascin-C. Over 27 splice variants and/or isoforms of tenascin-C are known. In a particular embodiment, the targeting moiety recognizes and binds to tenascin-CA1. Similarly, tenascin-R also has various splice variants and isoforms. Tenascin-R usually exists as dimers or trimers. Tenascin-X is the largest member of the tenascin family and is known to exist as trimers. Tenascin-W exists as trimers. In some embodiments, the targeting moiety recognizes one or more epitopes on a tenascin protein. In some embodiments, the targeting moiety recognizes the monomeric and/or the dimeric and/or the trimeric and/or the hexameric forms of a tenascin protein.

[0173] In an embodiment, the targeting moieties recognize and bind to fibronectin. Fibronectins are glycoproteins that connect cells with collagen fibers in the ECM, allowing cells to move through the ECM. Upon binding to integrins, fibronectins unfold to form functional dimers. In some embodiments, the targeting moiety recognizes the monomeric and/or the dimeric forms of fibronectin. In some embodiments, the targeting moiety recognizes one or more epitopes on fibronectin. In illustrative embodiments, the targeting moiety recognizes fibronectin extracellular domain A (EDA) or fibronectin extracellular domain B (EDB). Elevated levels of EDA are associated with various diseases and disorders including psoriasis, rheumatoid arthritis, diabetes, and cancer. In some embodiments, the targeting moiety recognizes fibronectin that contains the EDA isoform and may be utilized to target the chimeric proteins or chimeric protein complexes such as Fc-based chimeric protein complexes to diseased cells including cancer cells. In some embodiments, the targeting moiety recognizes fibronectin that contains the EDB isoform. In various embodiments, such targeting moieties may be utilized to target the chimeric proteins or chimeric protein complexes such as Fc-based chimeric protein complexes to tumor cells including the tumor neovasculature.

[0174] In an embodiment, the targeting moiety recognizes and binds to fibrin. Fibrin is another protein substance often found in the matrix network of the ECM. Fibrin is formed by the action of the protease thrombin on fibrinogen which causes the fibrin to polymerize. In some embodiments, the targeting moiety recognizes one or more epitopes on fibrin. In some embodiments, the targeting moiety recognizes the monomeric as well as the polymerized forms of fibrin.

[0175] In an embodiment, the targeting moiety recognizes and binds to laminin. Laminin is a major component of the basal lamina, which is a protein network foundation for cells and organs. Laminins are heterotrimeric proteins that contain an α-chain, a β-chain, and a γ-chain. In some embodiments, the targeting moiety recognizes one or more epitopes on laminin. In some embodiments, the targeting moiety recognizes the monomeric, the dimeric as well as the trimeric forms of laminin.

[0176] In an embodiment, the targeting moiety recognizes and binds to a nidogen or entactin. Nidogens/entactins are a family of highly conserved, sulfated glycoproteins. They make up the major structural component of the basement membranes and function to link laminin and collagen IV networks in basement membranes. Members of this family include nidogen-1 and nidogen-2. In various embodiments, the targeting moiety recognizes an epitope on nidogen-1 and/or nidogen-2.

[0177] In various embodiments, the targeting moiety comprises an antigen recognition domain that recognizes an epitope present on any of the targets described herein. In an embodiment, the antigen-recognition domain recognizes one or more linear epitopes present on the protein. As used herein, a linear epitope refers to any continuous sequence of amino acids present on the protein. In another embodiment, the antigen-recognition domain recognizes one or more conformational epitopes present on the protein. As used herein, a conformation epitope refers to one or more sections of amino acids (which may be discontinuous) which form a three-dimensional surface with features and/or shapes and/or tertiary structures capable of being recognized by an antigen recognition domain.

[0178] In various embodiments, the targeting moiety may bind to the full-length and/or mature forms and/or isoforms and/or splice variants and/or fragments and/or any other naturally occurring or synthetic analogs, variants, or mutants of any of the targets described herein. In various embodiments, the targeting moiety may bind to any forms of the proteins described herein, including monomeric, dimeric, trimeric, tetrameric, heterodimeric, multimeric and associated forms. In various embodiments, the targeting moiety may bind to any post-translationally modified forms of the proteins described herein, such as glycosylated and/or phosphorylated forms.

[0179] In various embodiments, the targeting moiety comprises an antigen recognition domain that recognizes extracellular molecules such as DNA. In some embodiments, the targeting moiety comprises an antigen recognition domain that recognizes DNA. In an embodiment, the DNA is shed into the extracellular space from necrotic or apoptotic tumor cells or other diseased cells.

[0180] In various embodiments, the targeting moiety comprises an antigen recognition domain that recognizes one or more non-cellular structures associated with atherosclerotic plaques. Two types of atherosclerotic plaques are known. The fibro-lipid (fibro-fatty) plaque is characterized by an accumulation of lipid-laden cells underneath the intima of the arteries. Beneath the endothelium there is a fibrous cap covering the atheromatous core of the plaque. The core includes lipid-laden cells (macrophages and smooth muscle cells) with elevated tissue cholesterol and cholesterol ester content, fibrin, proteoglycans, collagen, elastin, and cellular debris. In advanced plaques, the central core of the plaque usually contains extracellular cholesterol deposits (released from dead cells), which form areas of cholesterol crystals with empty, needle-like clefts. At the periphery of the plaque are younger foamy cells and capillaries. A fibrous plaque is also localized under the intima, within the wall of the artery resulting in thickening and expansion of the wall and, sometimes, spotty localized narrowing of the lumen with some atrophy of the muscular layer. The fibrous plaque contains collagen fibers (eosinophilic), precipitates of calcium (hematoxylinophilic) and lipid-laden cells. In some embodiments, the targeting moiety recognizes and binds to one or more of the non-cellular components of these plaques such as the fibrin, proteoglycans, collagen, elastin, cellular debris, and calcium or other mineral deposits or precipitates. In some embodiments, the cellular debris is a nucleic acid, e.g. DNA or RNA, released from dead cells.

[0181] In various embodiments, the targeting moiety comprises an antigen recognition domain that recognizes one or more non-cellular structures found in the brain plaques associated with neurodegenerative diseases. In some embodiments, the targeting moiety recognizes and binds to one or more non-cellular structures located in the amyloid plaques found in the brains of patients with Alzheimer's disease. For example, the targeting moiety may recognize and bind to the peptide amyloid beta, which is a major component of the amyloid plaques. In some embodiments, the targeting moiety recognizes and binds to one or more non-cellular structures located in the brains plaques found in patients with Huntington's disease. In various embodiments, the targeting moiety recognizes and binds to one or more non-cellular structures found in plaques associated with other neurodegenerative or musculoskeletal diseases such as Lewy body dementia and inclusion body myositis.

[0182] In some embodiments, the chimeric proteins or chimeric protein complexes such as Fc-based chimeric protein complexes of the invention may have two or more targeting moieties that bind to non-cellular structures. In some embodiments, there are two targeting moieties and one targets a cell while the other targets a non-cellular structure. In various embodiments, the targeting moieties can directly or indirectly recruit cells, such as disease cells and/or effector cells. In some embodiments, the present chimeric proteins or chimeric protein complexes such as Fc-based chimeric protein complexes are capable of, or find use in methods involving, shifting the balance of immune cells in favor of immune attack of a tumor. For instance, the present chimeric proteins or chimeric protein complexes such as Fc-based chimeric protein complexes can shift the ratio of immune cells at a site of clinical importance in favor of cells that can kill and/or suppress a tumor (e.g. T cells, cytotoxic T lymphocytes, T helper cells, natural killer (NK) cells, natural killer T (NKT) cells, anti-tumor macrophages (e.g. M1 macrophages), B cells, dendritic cells, or subsets thereof) and in opposition to cells that protect tumors (e.g. myeloid-derived suppressor cells (MDSCs), regulatory T cells (Tregs); tumor associated neutrophils (TANs), M2 macrophages, tumor associated macrophages (TAMs), or subsets thereof). In some embodiments, the present chimeric proteins or chimeric protein complexes such as Fc-based chimeric protein complexes are capable of increasing a ratio of effector T cells to regulatory T cells.

[0183] For example, in some embodiments, the recognition domains specifically bind to a target (e.g. antigen, receptor) associated with T cells. In some embodiments, the recognition domains directly or indirectly recruit T cells. In an embodiment, the recognition domains specifically bind to effector T cells. In some embodiments, the recognition domain directly or indirectly recruits effector T cells, e.g., in some embodiments, to a therapeutic site (e.g. a locus with one or more disease cell or cell to be modulated for a therapeutic effect). Illustrative effector T cells include cytotoxic T cells (e.g. αβ TCR, CD3⁺, CD8⁺, CD45RO⁺); CD4⁺ effector T cells (e.g. αβ TCR, CD3⁺, CD4⁺, CCR7⁺, CD62Lhi, IL:7R/CD127⁺); CD8⁺ effector T cells (e.g. αβ TCR, CD3⁺, CD8⁺, CCR7⁺, CD62Lhi, IL-7R/CD127⁺); effector memory T cells (e.g. CD62Llow, CD44⁺, TCR, CD3⁺, IL-7R/CD127⁺, IL-15R⁺, CCR7low); central memory T cells (e.g. CCR7⁺, CD62L+, CD27+; or CCR7hi, CD44⁺, CD62Lhi, TCR, CD3⁺, IL-7R/CD127⁺, IL-15R⁺); CD62L+ effector T cells; CD8⁺ effector memory T cells (TEM) including early effector memory T cells (CD27⁺CD62L⁻) and late effector memory T cells (CD27⁻CD62L⁻) (TemE and TemL, respectively); CD127(+)CD25(low/−) effector T cells; CD127(−)CD25(−) effector T cells; CD8⁺ stem cell memory effector cells (TSCM) (e.g. CD44(low)CD62L(high)CD122(high)sca(+)); TH1 effector T-cells (e.g. CXCR3⁺, CXCR6⁺ and CCR5⁺; or αβ TCR, CD3⁺, CD4⁺, IL-12R⁺, IFNγR⁺, CXCR3⁺), TH2 effector T cells (e.g. CCR3⁺, CCR4⁺ and CCR8+; or αβ TCR, CD3⁺, CD4⁺, IL-4R⁺, IL-33R⁺, CCR4⁺, IL-17R8⁺, CRTH2⁺); TH9 effector T cells (e.g. αβ TCR, CD3⁺, CD4⁺); TH17 effector T cells (e.g. αβ TCR, CD3⁺, CD4⁺, IL-23R⁺, CCR6⁺, IL-1R⁺); CD4⁺CD45RO⁺CCR7⁺ effector T cells, ICOS⁺ effector T cells; CD4⁺CD45RO⁺CCR7(−) effector T cells; and effector T cells secreting IL-2, IL-4 and/or IFN-γ.

[0184] Illustrative T cell antigens of interest include, for example (and inclusive of the extracellular domains, where applicable): CD8, CD3, SLAMF4, IL-2Rα, 4-1BB/TNFRSF9, IL-2 R β, ALCAM, B7-1, IL-4 R, B7-H3, BLAME/SLAMFS, CEACAM1, IL-6 R, CCR3, IL-7 Rα, CCR4, CXCRI/IL-S RA, CCR5, CCR6, IL-10R α, CCR 7, IL-I 0 R β, CCRS, IL-12 R β1, CCR9, IL-12 R β2, CD2, IL-13 R a 1, IL-13, CD3, CD4, ILT2/CDS5j, ILT3/CDS5k, ILT4/CDS5d, ILT5/CDS5a, Integrin α 4/CD49d, CDS, Integrin α E/CD103, CD6, Integrin α M/CD 11 b, CDS, Integrin α X/CD11c, Integrin β 2/CDIS, KIR/CD15S, CD27/TNFRSF7, KIR2DL1, CD2S, KIR2DL3, CD30/TNFRSFS, KIR2DL4/CD15Sd, CD31/PECAM-1, KIR2DS4, CD40 Ligand/TNFSF5, LAG-3, CD43, LAIR1, CD45, LAIR2, CDS3, Leukotriene B4-R1, CDS4/SLAMF5, NCAM-L1, CD94, NKG2A, CD97, NKG2C, CD229/SLAMF3, NKG2D, CD2F-10/SLAMF9, NT-4, CD69, NTB-A/SLAMF6, Common γ Chain/IL-2 R Y, Osteopontin, CRACC/SLAMF7, PD-1, CRTAM, PSGL-1, CTLA-4, RANK/TNFRSF11A, CX3CR1, CX3CL1, L-Selectin, CXCR3, SIRP B 1, CXCR4, SLAM, CXCR6, TCCR/WSX-1, DNAM-1, Thymopoietin, EMMPRIN/CD147, TIM-1, EphB6, TIM-2, Fas/TNFRSF6, TIM-3, Fas Ligand/TNFSF6, TIM-4, Fcγ RIII/CD16, TIM-6, TNFR1/TNFRSF1A, Granulysin, TNF RIII/TNFRSF1B, TRAIL RI/TNFRSFIOA, ICAM-1/CD54, TRAIL R2/TNFRSF10B, ICAM-2/CD102, TRAILR3/TNFRSF10C, IFN-γR1, TRAILR4/TNFRSF10D, IFN-γ R2, TSLP, IL-1 R1 and TSLP R. In various embodiments, a targeting moiety of the chimeric proteins or chimeric protein complexes such as Fc-based chimeric protein complexes binds one or more of these illustrative T cell antigens.

[0185] By way of non-limiting example, in various embodiments, the present chimeric proteins or chimeric protein complexes, such as Fc-based chimeric protein complexes, comprise a targeting moiety directed against a checkpoint marker expressed on a T cell, e.g. one or more of PD-1, PD-L1, CD28, CTLA4, ICOS, BTLA, KIR, LAG3, CD137, OX40, CD27, CD40L, TIM3, and A2aR.

[0186] For example, in some embodiments, the recognition domains specifically bind to a target (e.g. antigen, receptor) associated with B cells. In some embodiments, the recognition domains directly or indirectly recruit B cells, e.g., in some embodiments, to a therapeutic site (e.g. a locus with one or more disease cell or cell to be modulated for a therapeutic effect). Illustrative B cell antigens of interest include, for example, CD10, CD19, CD20, CD21, CD22, CD23, CD24, CD37, CD38, CD39, CD40, CD70, CD72, CD73, CD74, CDw75, CDw76, CD77, CD78, CD79a/b, CD80, CD81, CD82, CD83, CD84, CD85, CD86, CD89, CD98, CD126, CD127, CDw130, CD138, CDw150, CS1, and B-cell maturation antigen (BCMA). In various embodiments, a targeting moiety of the chimeric proteins or chimeric protein complexes, such as Fc-based chimeric protein complexes, bind one or more of these illustrative B cell antigens.

[0187] By way of further example, in some embodiments, the recognition domains specifically bind to a target (e.g. antigen, receptor) associated with Natural Killer cells. In some embodiments, the recognition domains directly or indirectly recruit Natural Killer cells, e.g., in some embodiments, to a therapeutic site (e.g. a locus with one or more disease cell or cell to be modulated for a therapeutic effect). Illustrative Natural Killer cell antigens of interest include, for example TIGIT, 2B4/SLAMF4, KIR2DS4, CD155/PVR, KIR3DL1, CD94, LMIR1/CD300A, CD69, LMIR2/CD300c, CRACC/SLAMF7, LMIR3/CD300LF, DNAM-1, LMIR5/CD300LB, Fc-epsilon RII, LMIR6/CD300LE, Fc-γ RI/CD64, MICA, Fc-γ RIIB/CD32b, MICB, Fc-γ RIIC/CD32c, MULT-1, Fc-γ RIIA/CD32a, Nectin-2/CD112, Fc-γ RIII/CD16, NKG2A, FcRH1/IRTA5, NKG2C, FcRH2/IRTA4, NKG2D, FcRH4/IRTA1, NKp30, FcRH5/IRTA2, NKp44, Fc-Receptor-like 3/CD16-2, NKp46/NCR1, NKp80/KLRF1, NTB-A/SLAMF6, Rae-1, Rae-1 α, Rae-1 β, Rae-1 delta, H60, Rae-1 epsilon, ILT2/CD85j, Rae-1 γ, ILT3/CD85k, TREM-1, ILT4/CD85d, TREM-2, ILT5/CD85a, TREM-3, KIR/CD158, TREML1/TLT-1, KIR2DL1, ULBP-1, KIR2DL3, ULBP-2, KIR2DL4/CD158d and ULBP-3. In various embodiments, a targeting moiety of the chimeric proteins or chimeric protein complexes, such as Fc-based chimeric protein complexes, bind one or more of these illustrative NK cell antigens.

[0188] Also, in some embodiments, the recognition domains specifically bind to a target (e.g. antigen, receptor) associated with macrophages/monocytes. In some embodiments, the recognition domains directly or indirectly recruit macrophages/monocytes, e.g., in some embodiments, to a therapeutic site (e.g. a locus with one or more disease cell or cell to be modulated for a therapeutic effect). Illustrative macrophages/monocyte antigens of interest include, for example SIRP1a, B7-1/CD80, ILT4/CD85d, B7-H1, ILT5/CD85a, Common β Chain, Integrin α 4/CD49d, BLAME/SLAMF8, Integrin α X/CDIIc, CCL6/C10, Integrin β 2/CD18, CD155/PVR, Integrin β 3/CD61, CD31/PECAM-1, Latexin, CD36/SR-B3, Leukotriene B4 R1, CD40/TNFRSF5, LIMPIIISR-B2, CD43, LMIR1/CD300A, CD45, LMIR2/CD300c, CD68, LMIR3/CD300LF, CD84/SLAMF5, LMIR5/CD300LB, CD97, LMIR6/CD300LE, CD163, LRP-1, CD2F-10/SLAMF9, MARCO, CRACC/SLAMF7, MD-1, ECF-L, MD-2, EMMPRIN/CD147, MGL2, Endoglin/CD105, Osteoactivin/GPNMB, Fc-γ RI/CD64, Osteopontin, Fc-γ RIIB/CD32b, PD-L2, Fc-γ RIIC/CD32c, Siglec-3/CD33, Fc-γ RIIA/CD32a, SIGNR1/CD209, Fc-γ RIII/CD16, SLAM, GM-CSF R α, TCCR/WSX-1, ICAM-2/CD102, TLR3, IFN-γ RI, TLR4, IFN-γ R2, TREM-I, IL-I RII, TREM-2, ILT2/CD85j, TREM-3, ILT3/CD85k, TREML1/TLT-1, 2B4/SLAMF 4, IL-10 R α, ALCAM, IL-10 R β, AminopeptidaseN/ANPEP, ILT2/CD85j, Common β Chain, ILT3/CD85k, Clq R1/CD93, ILT4/CD85d, CCR1, ILT5/CD85a, CCR2, Integrin α 4/CD49d, CCR5, Integrin α M/CDII b, CCR8, Integrin α X/CDIIc, CD155/PVR, Integrin β 2/CD18, CD14, Integrin β 3/CD61, CD36/SR-B3, LAIR1, CD43, LAIR2, CD45, Leukotriene B4-R1, CD68, LIMPIIISR-B2, CD84/SLAMF5, 20) LMIR1/CD300A, CD97, LMIR2/CD300c, LMIR3/CD300LF, Coagulation Factor III/Tissue Factor, LMIR5/CD300LB, CX3CR1, CX3CL1, LMIR6/CD300LE, CXCR4, LRP-1, CXCR6, M-CSF R, DEP-1/CD148, MD-1, DNAM-1, MD-2, EMMPRIN/CD147, MMR, Endoglin/CD105, NCAM-L1, Fc-γ RI/CD64, PSGL-1, Fc-γ RIIIICD16, RP105, G-CSF R, L-Selectin, GM-CSF R α, Siglec-3/CD33, HVEM/TNFRSF14, SLAM, ICAM-1/CD54, TCCR/WSX-1, ICAM-2/CD102, TREM-I, IL-6 R, TREM-2, CXCRI/IL-8 RA, TREM-3 and TREMLI/TLT-1. In various embodiments, a targeting moiety of the chimeric proteins or chimeric protein complexes, such as Fc-based chimeric protein complexes, bind one or more of these illustrative macrophage/monocyte antigens.

[0189] Also, in some embodiments, the recognition domains specifically bind to a target (e.g. antigen, receptor) associated with dendritic cells. In some embodiments, the recognition domains directly or indirectly recruit dendritic cells, e.g., in some embodiments, to a therapeutic site (e.g. a locus with one or more disease cell or cell to be modulated for a therapeutic effect). Illustrative dendritic cell antigens of interest include, for example, CLEC9A, XCR1, RANK, CD36/SRB3, LOX-1/SR-E1, CD68, MARCO, CD163, SR-A1/MSR, CD5L, SREC-1, CL-PI/COLEC12, SREC-II, LIMPIIISRB2, RP105, TLR4, TLR1, TLR5, TLR2, TLR6, TLR3, TLR9, 4-IBB Ligand/TNFSF9, IL-12/IL-23 p40, 4-Amino-1,8-naphthalimide, ILT2/CD85j, CCL21/6Ckine, ILT3/CD85k, 8-oxo-dG, ILT4/CD85d, 8D6A, ILT5/CD85a, A2B5, Integrin α 4/CD49d, Aag, Integrin β 2/CD18, AMICA, Langerin, B7-2/CD86, Leukotriene B4 RI, B7-H3, LMIR1/CD300A, BLAME/SLAMF8, LMIR2/CD300c, Clq R1/CD93, LMIR3/CD300LF, CCR6, LMIR5/CD300LB CCR7, LMIR6/CD300LE, CD40/TNFRSF5, MAG/Siglec-4-a, CD43, MCAM, CD45, MD-1, CD68, MD-2, CD83, MDL-1/CLEC5A, CD84/SLAMF5, MMR, CD97, NCAMLI, CD2F-10/SLAMF9, Osteoactivin GPNMB, Chern 23, PD-L2, CLEC-1, RP105, CLEC-2, CLEC-8, Siglec-2/CD22, CRACC/SLAMF7, Siglec-3/CD33, DC-SIGN, Siglec-5, DC-SIGNR/CD299, Siglec-6, DCAR, Siglec-7, DCIR/CLEC4A, Siglec-9, DEC-205, Siglec-10, Dectin-1/CLEC7A, Siglec-F, Dectin-2/CLEC6A, SIGNR1/CD209, DEP-1/CD148, SIGNR4, DLEC/CLEC4C, SLAM, EMMPRIN/CD147, TCCR/WSX-1, Fc-γ R1/CD64, TLR3, Fc-γ RIIB/CD32b, TREM-1, Fc-γ RIIC/CD32c, TREM-2, Fc-γ RIIA/CD32a, TREM-3, Fc-γ RIII/CD16, TREML1/TLT-1, ICAM-2/CD102 and Vanilloid R1. In various embodiments, a targeting moiety of the chimeric proteins or chimeric protein complexes, such as Fc-based chimeric protein complexes, bind one or more of these illustrative DC antigens.

[0190] In some embodiments, the recognition domains specifically bind to a target (e.g. antigen, receptor) on immune cells selected from, but not limited to, megakaryocytes, thrombocytes, erythrocytes, mast cells, basophils, neutrophils, myeloid cells, monocytes, eosinophils, or subsets thereof. In some embodiments, the recognition domains directly or indirectly recruit megakaryocytes, thrombocytes, erythrocytes, mast cells, basophils, neutrophils, myeloid cells, monocytes, eosinophils, or subsets thereof, e.g., in some embodiments, to a therapeutic site (e.g. a locus with one or more disease cell or cell to be modulated for a therapeutic effect). In some embodiments, the immune cell is selected from a T cell, a B cell, a dendritic cell, a macrophage, a neutrophil, a mast cell, a monocyte, a red blood cell, myeloid cell, myeloid derived suppressor cell, a NKT cell, and a NK cell, or derivatives thereof. In some embodiments, the immune cell is a T cell and the targeting moiety targets CD8. In some embodiments, the immune cell is a Treg and the targeting moiety targets CTLA4. In some embodiments, the immune cell is an NK cell and the targeting moiety is NKp46.

[0191] In some embodiments, the recognition domains specifically bind to a target (e.g. antigen, receptor) associated with megakaryocytes and/or thrombocytes. Illustrative megakaryocyte and/or thrombocyte antigens of interest include, for example, GP IIb/IIIa, GPIb, vWF, PF4, and TSP. In various embodiments, a targeting moiety of the chimeric proteins or chimeric protein complexes, such as Fc-based chimeric protein complexes, bind one or more of these illustrative megakaryocyte and/or thrombocyte antigens.

[0192] In some embodiments, the recognition domains specifically bind to a target (e.g. antigen, receptor) associated with erythrocytes. Illustrative erythrocyte antigens of interest include, for example, CD34, CD36, CD38, CD41a (platelet glycoprotein IIb/IIIa), CD41b (GPIIb), CD71 (transferrin receptor), CD105, glycophorin A, glycophorin C, c-kit, HLA-DR, H2 (MHC-II), and Rhesus antigens. In various embodiments, a targeting moiety of the chimeric proteins or chimeric protein complexes, such as Fc-based chimeric protein complexes, bind one or more of these illustrative erythrocyte antigens.

[0193] In some embodiments, the recognition domains specifically bind to a target (e.g. antigen, receptor) associated with mast cells. Illustrative mast cells antigens of interest include, for example, SCFR/CD117, Fc_{ε}RI, CD2, CD25, CD35, CD88, CD203c, C5R1, CMAI, FCERIA, FCER2, TPSABI. In various embodiments, a targeting moiety of the chimeric proteins or chimeric protein complexes. such as Fc-based chimeric protein complexes, bind one or more of these mast cell antigens.

[0194] In some embodiments, the recognition domains specifically bind to a target (e.g. antigen, receptor) associated with basophils. Illustrative basophils antigens of interest include, for example, Fc_{ε}RI, CD203c, CD123, CD13, CD107a, CD107b, and CD164. In various embodiments, a targeting moiety of the chimeric proteins or chimeric protein complexes, such as Fc-based chimeric protein complexes, bind one or more of these basophil antigens.

[0195] In some embodiments, the recognition domains specifically bind to a target (e.g. antigen, receptor) associated with neutrophils. Illustrative neutrophils antigens of interest include, for example, 7D5, CD10/CALLA, CD13, CD16 (FcRIII), CD18 proteins (LFA-1, CR3, and p150, 95), CD45, CD67, and CD177. In various embodiments, a targeting moiety of the chimeric proteins or chimeric protein complexes, such as Fc-based chimeric protein complexes, bind one or more of these neutrophil antigens.

[0196] In some embodiments, the recognition domains specifically bind to a target (e.g. antigen, receptor) associated with eosinophils. Illustrative eosinophils antigens of interest include, for example, CD35, CD44 and CD69. In various embodiments, a targeting moiety of the chimeric proteins or chimeric protein complexes, such as Fc-based chimeric protein complexes, bind one or more of these eosinophil antigens.

[0197] In various embodiments, the recognition domain may bind to any appropriate target, antigen, receptor, or cell surface markers known by the skilled artisan. In some embodiments, the antigen or cell surface marker is a tissue-specific marker. Illustrative tissue-specific markers include, but are not limited to, endothelial cell surface markers such as ACE, CD14, CD34, CDH5, ENG, ICAM2, MCAM, NOS3, PECAMI, PROCR, SELE, SELP, TEK, THBD, VCAMI, VWF; smooth muscle cell surface markers such as ACTA2, MYHIO, MYHI 1, MYH9, MYOCD; fibroblast (stromal) cell surface markers such as ALCAM, CD34, COLIAI, COL1A2, COL3A1, FAP, PH-4; epithelial cell surface markers such as CDID, K6IRS2, KRTIO, KRT13, KRT17, KRT18, KRT19, KRT4, KRT5, KRT8, MUCI, TACSTDI; neovasculature markers such as CD13, TFNA, Alpha-v beta-3 (αᵥβ₃), E-selectin; and adipocyte surface markers such as ADIPOQ, FABP4, and RETN. In various embodiments, a targeting moiety of the chimeric proteins or chimeric protein complexes such as Fc-based chimeric protein complexes binds one or more of these antigens. In various embodiments, a targeting moiety of the chimeric proteins or chimeric protein complexes, such as Fc-based chimeric protein complexes, bind one or more of cells having these antigens.

[0198] In some embodiments, the recognition domains specifically bind to a target (e.g. antigen, receptor) associated with tumor cells. In some embodiments, the recognition domains directly or indirectly recruit tumor cells. For instance, in some embodiments, the direct or indirect recruitment of the tumor cell is to one or more effector cell (e.g. an immune cell as described herein) that can kill and/or suppress the tumor cell.

[0199] Tumor cells, or cancer cells refer to an uncontrolled growth of cells or tissues and/or an abnormal increase in cell survival and/or inhibition of apoptosis which interferes with the normal functioning of bodily organs and systems. For example, tumor cells include benign and malignant cancers, polyps, hyperplasia, as well as dormant tumors or micrometastases. Illustrative tumor cells include, but are not limited to cells of: basal cell carcinoma, biliary tract cancer; bladder cancer; bone cancer; brain and central nervous system cancer; breast cancer; cancer of the peritoneum; cervical cancer; choriocarcinoma; colon and rectum cancer; connective tissue cancer; cancer of the digestive system; endometrial cancer; esophageal cancer; eye cancer; cancer of the head and neck; gastric cancer (including gastrointestinal cancer); glioblastoma; hepatic carcinoma; hepatoma; intra-epithelial neoplasm; kidney or renal cancer; larynx cancer; leukemia; liver cancer; lung cancer (e.g., small-cell lung cancer, non-small cell lung cancer, adenocarcinoma of the lung, and squamous carcinoma of the lung); melanoma; myeloma; neuroblastoma; oral cavity cancer (lip, tongue, mouth, and pharynx); ovarian cancer; pancreatic cancer; prostate cancer; retinoblastoma; rhabdomyosarcoma; rectal cancer; cancer of the respiratory system; salivary gland carcinoma; sarcoma; skin cancer; squamous cell cancer; stomach cancer; testicular cancer; thyroid cancer; uterine or endometrial cancer; cancer of the urinary system; vulval cancer; lymphoma including Hodgkin's and non-Hodgkin's lymphoma, as well as B-cell lymphoma (including low grade/follicular non-Hodgkin's lymphoma (NHL); small lymphocytic (SL) NHL; intermediate grade/follicular NHL; intermediate grade diffuse NHL; high grade immunoblastic NHL; high grade lymphoblastic NHL; high grade small non-cleaved cell NHL; bulky disease NHL; mantle cell lymphoma; AIDS-related lymphoma; and Waldenstrom's Macroglobulinemia; chronic lymphocytic leukemia (CLL); acute lymphoblastic leukemia (ALL); Hairy cell leukemia; chronic myeloblastic leukemia; as well as other carcinomas and sarcomas; and post-transplant lymphoproliferative disorder (PTLD), as well as abnormal vascular proliferation associated with phakomatoses, edema (e.g. that associated with brain tumors), and Meigs' syndrome.

[0200] Tumor cells, or cancer cells also include, but are not limited to, carcinomas, e.g. various subtypes, including, for example, adenocarcinoma, basal cell carcinoma, squamous cell carcinoma, and transitional cell carcinoma), sarcomas (including, for example, bone and soft tissue), leukemias (including, for example, acute myeloid, acute lymphoblastic, chronic myeloid, chronic lymphocytic, and hairy cell), lymphomas and myelomas (including, for example, Hodgkin and non-Hodgkin lymphomas, light chain, non-secretory, MGUS, and plasmacytomas), and central nervous system cancers (including, for example, brain (e.g. gliomas (e.g. astrocytoma, oligodendroglioma, and ependymoma), meningioma, pituitary adenoma, and neuromas, and spinal cord tumors (e.g. meningiomas and neurofibroma).

[0201] Illustrative tumor antigens include, but are not limited to, MART-1/Melan-A, gp100, Dipeptidyl peptidase IV (DPPIV), adenosine deaminase-binding protein (ADAbp), cyclophilin b, Colorectal associated antigen (CRC)-0017-1A/GA733, Carcinoembryonic Antigen (CEA) and its immunogenic epitopes CAP-1 and CAP-2, etv6, aml1, Prostate Specific Antigen (PSA) and its immunogenic epitopes PSA-1, PSA-2, and PSA-3, prostate-specific membrane antigen (PSMA), T-cell receptor/CD3-zeta chain, MAGE-family of tumor antigens (e.g., MAGE-A1, MAGE-A2, MAGE-A3, MAGE-A4, MAGE-A5, MAGE-A6, MAGE-A7, MAGE-A8, MAGE-A9, MAGE-A10, MAGE-A11, MAGE-A12, MAGE-Xp2 (MAGE-B2), MAGE-Xp3 (MAGE-B3), MAGE-Xp4 (MAGE-B4), MAGE-C1, MAGE-C2, MAGE-C3, MAGE-C4, MAGE-C5), GAGE-family of tumor antigens (e.g., GAGE-1, GAGE-2, GAGE-3, GAGE-4, GAGE-5, GAGE-6, GAGE-7, GAGE-8, GAGE-9), BAGE, RAGE, LAGE-1, NAG, GnT-V, MUM-1, CDK4, tyrosinase, p53, MUC family, HER2/neu, p21ras, RCAS1, α-fetoprotein, E-cadherin, α-catenin, β-catenin and γ-catenin, p120ctn, gp100 Pmel117, PRAME, NY-ESO-1, cdc27, adenomatous polyposis coli protein (APC), fodrin, Connexin 37, Ig-idiotype, p15, gp75, GM2 and GD2 gangliosides, viral products such as human papilloma virus proteins, Smad family of tumor antigens, Imp-1, NA, EBV-encoded nuclear antigen (EBNA)-1, brain glycogen phosphorylase, SSX-1, SSX-2 (HOM-MEL-40), SSX-1, SSX-4, SSX-5, SCP-1 CT-7, c-erbB-2, CD19, CD20, CD22, CD30, CD33, CD37, CD47, CS1, CD38, ASGPR, CD56, CD70, CD74, CD138, AGS 16, MUC1, GPNMB, Ep-CAM, PD-L1, PD-L2, PMSA, and BCMA (TNFRSF17). In various embodiments, a targeting moiety of the chimeric proteins or chimeric protein complexes, such as Fc-based chimeric protein complexes, bind one or more of these tumor antigens. In an embodiment, the chimeric proteins or chimeric protein complexes, such as Fc-based chimeric protein complexes, bind to HER2. In another embodiment, the chimeric proteins or chimeric protein complexes, such as Fc-based chimeric protein complexes, bind to PD-L2.

[0202] In some embodiments, the present chimeric proteins or chimeric protein complexes, such as Fc-based chimeric protein complexes, have one or more of the targeting moieties which is directed against an immune cell selected from a T cell, a B cell, a dendritic cell, a neutrophil, a myeloid derived suppressor cell, a macrophage, a NK cell, or subsets thereof, along with any of the signaling agents (e.g., modified IL-2) described herein. In one embodiment, the present chimeric proteins or chimeric protein complexes such as Fc-based chimeric protein complexes have a targeting moiety directed against a T cell (including, without limitation an effector T cell), along with any of the signaling agents described herein. In one embodiment, the present chimeric proteins or chimeric protein complexes such as Fc-based chimeric protein complexes have a targeting moiety directed against a B cell, along with any of the signaling agents described herein. In one embodiment, the present chimeric proteins or chimeric protein complexes such as Fc-based chimeric protein complexes have a targeting moiety directed against a dendritic cell, along with any of the signaling agents described herein. In one embodiment, the present chimeric proteins or chimeric protein complexes such as Fc-based chimeric protein complexes have a targeting moiety directed against a macrophage, along with any of the signaling agents described herein. In one embodiment, the present chimeric proteins or chimeric protein complexes such as Fc-based chimeric protein complexes have a targeting moiety directed against a NK cell, along with any of the signaling agents described herein.

[0203] By way of non-limiting example, in various embodiments, the present chimeric proteins or chimeric protein complexes such as Fc-based chimeric protein complexes have a targeting moiety directed against a T cell, for example, mediated by targeting to CD8, SLAMF4, IL-2 R α, 4-1BB/TNFRSF9, IL-2 R β, ALCAM, B7-1, IL-4 R, B7-H3, BLAME/SLAMFS, CEACAM1, IL-6 R, CCR3, IL-7 Rα, CCR4, CXCRI/IL-S RA, CCR5, CCR6, IL-10R α, CCR 7, IL-10 R β, CCRS, IL-12 R β1, CCR9, IL-12 R β2, CD2, IL-13 R a 1, IL-13, CD3, CD4, ILT2/CDS5j, ILT3/CDS5k, ILT4/CDS5d, ILT5/CDS5a, Integrin α 4/CD49d, CDS, Integrin α E/CD103, CD6, Integrin α M/CD 11 b, CDS, Integrin α X/CD11c, Integrin β 2/CDIS, KIR/CD15S, CD27/TNFRSF7, KIR2DL1, CD2S, KIR2DL3, CD30/TNFRSFS, KIR2DL4/CD15Sd, CD31/PECAM-1, KIR2DS4, CD40 Ligand/TNFSF5, LAG-3, CD43, LAIR1, CD45, LAIR2, CDS3, Leukotriene B4-R1, CDS4/SLAMF5, NCAM-L1, CD94, NKG2A, CD97, NKG2C, CD229/SLAMF3, NKG2D, CD2F-10/SLAMF9, NT-4, CD69, NTB-A/SLAMF6, Common γ Chain/IL-2 R Y, Osteopontin, CRACC/SLAMF7, PD-1, CRTAM, PSGL-1, CTLA-4, RANK/TNFRSF11A, CX3CR1, CX3CL1, L-Selectin, CXCR3, SIRP β 1, CXCR4, SLAM, CXCR6, TCCR/WSX-1, DNAM-1, Thymopoietin, EMMPRIN/CD147, TIM-1, EphB6, TIM-2, Fas/TNFRSF6, TIM-3, Fas Ligand/TNFSF6, TIM-4, Fcγ RIII/CD16, TIM-6, TNFR1/TNFRSF1A, Granulysin, TNF RIII/TNFRSF1B, TRAIL RI/TNFRSFIOA, ICAM-1/CD54, TRAIL R2/TNFRSF10B, ICAM-2/CD102, TRAILR3/TNFRSF10C, IFN-γR1, TRAILR4/TNFRSF10D, IFN-γ R2, TSLP, IL-1 R1, or TSLP R; along with any of the signaling agents (e.g., a modified IL-2) described herein.

[0204] By way of non-limiting example, in various embodiments, the present chimeric proteins or chimeric protein complexes such as Fc-based chimeric protein complexes have a targeting moiety directed against a checkpoint marker expressed on a T cell, e.g. one or more of PD-1, CD28, CTLA4, ICOS, BTLA, KIR, LAG3, CD137, OX40, CD27, CD40L, TIM3, and A2aR, along with any of the signaling agents described herein.

[0205] In various embodiments, the present chimeric proteins or chimeric protein complexes such as Fc-based chimeric protein complexes have one or more targeting moieties directed against PD-1. In some embodiments, the chimeric proteins or chimeric protein complexes such as Fc-based chimeric protein complexes have one or more targeting moieties which selectively bind a PD-1 polypeptide. In some embodiments, the chimeric proteins or chimeric protein complexes, such as Fc-based chimeric protein complexes, comprise one or more antibodies, antibody derivatives or formats, peptides or polypeptides, or fusion proteins that selectively bind a PD-1 polypeptide.

[0206] In an embodiment, the targeting moiety comprises the anti-PD-1 antibody pembrolizumab (aka MK-3475, KEYTRUDA), or fragments thereof. Pembrolizumab and other humanized anti-PD-1 antibodies are disclosed in Hamid, et al. (2013) New England Journal of Medicine 369 (2): 134-44, U.S. Pat. No. 8,354,509, and WO 2009/114335, the entire disclosures of which are hereby incorporated by reference. In illustrative embodiments, pembrolizumab or an antigen-binding fragment thereof for use in the methods provided herein comprises a heavy chain comprising the amino acid sequence of SEQ ID NO: 7 and/or a light chain comprising the amino acid sequence of SEQ ID NO: 8.

[0207] In an embodiment, the targeting moiety comprises the anti-PD-1 antibody, nivolumab (aka BMS-936558, MDX-1106, ONO-4538, OPDIVO), or fragments thereof. Nivolumab (clone 5C4) and other human monoclonal antibodies that specifically bind to PD-1 are disclosed in U.S. Pat. No. 8,008,449 and WO 2006/121168, the entire disclosures of which are hereby incorporated by reference. In illustrative embodiments, nivolumab or an antigen-binding fragment thereof comprises a heavy chain comprising the amino acid sequence of SEQ ID NO: 9 and/or a light chain comprising the amino acid sequence of SEQ ID NO: 10.

[0208] In an embodiment, the targeting moiety comprises the anti-PD-1 antibody pidilizumab (aka CT-011, hBAT or hBAT-1), or fragments thereof. Pidilizumab and other humanized anti-PD-I monoclonal antibodies are disclosed in US 2008/0025980 and WO 2009/101611, the entire disclosures of which are hereby incorporated by reference. In illustrative embodiments, the anti-PD-1 antibody or an antigen-binding fragment thereof for use in the methods provided herein comprises a light chain variable regions comprising an amino acid sequence selected from SEQ ID NOs: 15-18 of US 2008/0025980: SEQ ID NO: 15 of US 2008/0025980 (SEQ ID NO: 11); SEQ ID NO: 16 of US 2008/0025980 (SEQ ID NO: 12); SEQ ID NO: 17 of US 2008/0025980 (SEQ ID NO: 13); and SEQ ID NO: 18 of US 2008/0025980 (SEQ ID NO: 14); and/or a heavy chain comprising an amino acid sequence selected from SEQ ID NOs: 20-24 of US 2008/0025980: SEQ ID NO: 20 of US 2008/0025980 (SEQ ID NO: 15); SEQ ID NO: 21 of US 2008/0025980 (SEQ ID NO: 16); SEQ ID NO: 22 of US 2008/0025980 (SEQ ID NO: 17); SEQ ID NO: 23 of US 2008/0025980 (SEQ ID NO: 18); and SEQ ID NO: 24 of US 2008/0025980 (SEQ ID NO: 19).

[0209] In an embodiment, the targeting moiety comprises a light chain comprising SEQ ID NO: 18 of US 2008/0025980 (SEQ ID NO: 14) and a heavy chain comprising SEQ ID NO: 22 of US 2008/0025980 (SEQ ID NO: 17).

[0210] In an embodiment, the targeting moiety comprises AMP-514 (aka MEDI-0680).

[0211] In an embodiment, the targeting moiety comprises the PD-L2-Fc fusion protein AMP-224, which is disclosed in WO2010/027827 and WO 2011/066342, the entire disclosures of which are hereby incorporated by reference. In such an embodiment, the targeting moiety may include a targeting domain which comprises SEQ ID NO:4 of WO2010/027827 (SEQ ID NO: 20) and/or the B7-DC fusion protein which comprises SEQ ID NO:83 of WO2010/027827 (SEQ ID NO: 21).

[0212] In an embodiment, the targeting moiety comprises the PD-L1-Fc fusion protein and/or the PD-1-Fc fusion protein, as described in WO 2019/191519.

[0213] In an embodiment, the targeting moiety comprises the peptide AUNP 12 or any of the other peptides disclosed in US 2011/0318373 or 8,907,053. For example, the targeting moiety may comprise AUNP 12 (i.e., Compound 8 or SEQ ID NO:49 of US 2011/0318373) which has the sequence of:

[chemical structure]

[0214] In an embodiment, the targeting moiety comprises the anti-PD-1 antibody 1E3, or fragments thereof, as disclosed in US 2014/0044738, the entire disclosures of which are hereby incorporated by reference. In illustrative embodiments, 1E3 or an antigen-binding fragment thereof for use in the methods provided herein comprises a heavy chain variable region comprising the amino acid sequence of SEQ ID NO: 23; and/or a light chain variable region comprising the amino acid sequence of SEQ ID NO: 24.

[0215] In an embodiment, the targeting moiety comprises the anti-PD-1 antibody 1E8, or fragments thereof, as disclosed in US 2014/0044738, the entire disclosures of which are hereby incorporated by reference. In illustrative embodiments, 1E8 or an antigen-binding fragment thereof for use in the methods provided herein comprises a heavy chain variable region comprising the amino acid sequence of SEQ ID NO: 25 and/or a light chain variable region comprising the amino acid sequence of SEQ ID NO: 26.

[0216] In an embodiment, the targeting moiety comprises the anti-PD-1 antibody 1H3, or fragments thereof, as disclosed in US 2014/0044738, the entire disclosures of which are hereby incorporated by reference. In illustrative embodiments, 1H3 or an antigen-binding fragment thereof for use in the methods provided herein comprises a heavy chain variable region comprising the amino acid sequence of SEQ ID NO: 27 and/or light chain variable region comprising the amino acid sequence of SEQ ID NO: 28.

[0217] In an embodiment, the targeting moiety comprises a VHH directed against PD-1 as disclosed, for example, in U.S. Pat. No. 8,907,065 and WO 2008/071447, the entire disclosures of which are hereby incorporated by reference. In illustrative embodiments, the VHHs against PD-1 comprise SEQ ID NOs: 347-351 of U.S. Pat. No. 8,907,065 (SEQ ID NO: 347 of U.S. Pat. No. 8,907,065 (SEQ ID NO: 29); SEQ ID NO: 348 of U.S. Pat. No. 8,907,065 (SEQ ID NO:30); SEQ ID NO: 349 of U.S. Pat. No. 8,907,065 (SEQ ID NO:31); SEQ ID NO: 350 of U.S. Pat. No. 8,907,065 (SEQ ID NO: 32); and SEQ ID NO: 351 of U.S. Pat. No. 8,907,065 (SEQ ID NO:33)).

[0218] In an embodiment, the targeting moiety comprises any one of the anti-PD-1 antibodies, or fragments thereof, as disclosed in US2011/0271358 and WO2010/036959, the entire contents of which are hereby incorporated by reference. In illustrative embodiments, the antibody or an antigen-binding fragment thereof for use in the methods provided herein comprises a heavy chain comprising an amino acid sequence selected from SEQ ID NOs: 25-29 of US2011/0271358 (SEQ ID NO: 25 of US2011/0271358 (SEQ ID NO:34); SEQ ID NO: 26 of US2011/0271358 (SEQ ID NO:35); SEQ ID NO: 27 of US2011/0271358 (SEQ ID NO:36); SEQ ID NO: 28 of US2011/0271358 (SEQ ID NO:37); and SEQ ID NO: 29 of US2011/0271358 (SEQ ID NO:38); and/or a light chain comprising an amino acid sequence selected from SEQ ID NOs: 30-33 of US2011/0271358 (SEQ ID NO: 30 of US2011/0271358 (SEQ ID NO:39); SEQ ID NO: 31 of US2011/0271358 (SEQ ID NO:40); SEQ ID NO: 32 of US2011/0271358 (SEQ ID NO:41); and SEQ ID NO: 33 of US2011/0271358 (SEQ ID NO:42)).

[0219] In various embodiments, the present chimeric proteins or chimeric protein complexes, such as Fc-based chimeric protein complexes, comprise one or more antibodies directed against PD-1, or antibody fragments thereof, selected from TSR-042 (Tesaro, Inc.), REGN2810 (Regeneron Pharmaceuticals, Inc.), PDR001 (Novartis Pharmaceuticals), and BGB-A317 (BeiGene Ltd.).

[0220] In various embodiments, the present chimeric proteins or chimeric protein complexes, such as Fc-based chimeric protein complexes, have one or more targeting moieties directed against PD-L1. In some embodiments, the chimeric proteins or chimeric protein complexes, such as Fc-based chimeric protein complexes, have one or more targeting moieties which selectively bind a PD-L1 polypeptide. In some embodiments, the chimeric proteins or chimeric protein complexes, such as Fc-based chimeric protein complexes, comprise one or more antibodies, antibody derivatives or formats, peptides or polypeptides, or fusion proteins that selectively bind a PD-L1 polypeptide.

[0221] In an embodiment, the targeting moiety comprises the anti-PD-L1 antibody MEDI4736 (aka durvalumab), or fragments thereof. MEDI4736 is selective for PD-L1 and blocks the binding of PD-L1 to the PD-1 and CD80 receptors. MEDI4736 and antigen-binding fragments thereof for use in the methods provided herein comprises a heavy chain and a light chain or a heavy chain variable region and a light chain variable region. The sequence of MEDI4736 is disclosed in WO/2016/06272, the entire contents of which are hereby incorporated by reference. In illustrative embodiments, MEDI4736 or an antigen-binding fragment thereof for use in the methods provided herein comprises a heavy chain comprising the amino acid sequence of SEQ ID NO:43; and/or a light chain comprising the amino acid sequence of SEQ ID NO:44.

[0222] In illustrative embodiments, the MEDI4736 or an antigen-binding fragment thereof for use in the methods provided herein comprises a heavy chain variable region comprising the amino acid sequence of SEQ ID NO:4 of WO/2016/06272 (SEQ ID NO:45); and/or a light chain variable region comprising the amino acid sequence of SEQ ID NO:3 of WO/2016/06272 (SEQ ID NO:46).

[0223] In an embodiment, the targeting moiety comprises the anti-PD-L1 antibody atezolizumab (aka MPDL3280A, RG7446), or fragments thereof. In illustrative embodiments, atezolizumab or an antigen-binding fragment thereof for use in the methods provided herein comprises a heavy chain comprising the amino acid sequence of SEQ ID NO:47; and/or a light chain comprising the amino acid sequence of SEQ ID NO:48.

[0224] In an embodiment, the targeting moiety comprises the anti-PD-L1 antibody avelumab (aka MSB0010718C), or fragments thereof. In illustrative embodiments, avelumab or an antigen-binding fragment thereof for use in the methods provided herein comprises a heavy chain comprising the amino acid sequence of SEQ ID NO:49; and/or a light chain comprising the amino acid sequence of SEQ ID NO:50.

[0225] In an embodiment, the targeting moiety comprises the anti-PD-L1 antibody BMS-936559 (aka 12A4, MDX-1105), or fragments thereof, as disclosed in US 2013/0309250 and WO2007/005874, the entire disclosures of which are hereby incorporated by reference. In illustrative embodiments, BMS-936559 or an antigen-binding fragment thereof for use in the methods provided herein comprises a heavy chain variable region comprising the amino acid sequence of: (SEQ ID NO:51); and/or a light chain variable region comprising the amino acid sequence of (SEQ ID NO:52).

[0226] In an embodiment, the targeting moiety comprises the anti-PD-L1 antibody 3G10, or fragments thereof, as disclosed in US 2013/0309250 and WO2007/005874, the entire disclosures of which are hereby incorporated by reference. In illustrative embodiments, 3G10 or an antigen-binding fragment thereof for use in the methods provided herein comprises a heavy chain variable region comprising the amino acid sequence of (SEQ ID NO: 53); and/or a light chain variable region comprising the amino acid sequence of (SEQ ID NO: 54).

[0227] In an embodiment, the targeting moiety comprises the anti-PD-L1 antibody 10A5, or fragments thereof, as disclosed in US 2013/0309250 and WO2007/005874, the entire disclosures of which are hereby incorporated by reference. In illustrative embodiments, 10A5 or an antigen-binding fragment thereof for use in the methods provided herein comprises a heavy chain variable region comprising the amino acid sequence of (SEQ ID NO: 55); and/or a light chain variable region comprising the amino acid sequence of (SEQ ID NO: 56).

[0228] In an embodiment, the targeting moiety comprises the anti-PD-L1 antibody 5F8, or fragments thereof, as disclosed in US 2013/0309250 and WO2007/005874, the entire disclosures of which are hereby incorporated by reference. In illustrative embodiments, 5F8 or an antigen-binding fragment thereof for use in the methods provided herein comprises a heavy chain variable region comprising the amino acid sequence of (SEQ ID NO: 57); and/or a light chain variable region comprising the amino acid sequence of (SEQ ID NO: 58).

[0229] In an embodiment, the targeting moiety comprises the anti-PD-L1 antibody 10H10, or fragments thereof, as disclosed in US 2013/0309250 and WO2007/005874, the entire disclosures of which are hereby incorporated by reference. In illustrative embodiments, 10H10 or an antigen-binding fragment thereof for use in the methods provided herein comprises a heavy chain variable region comprising the amino acid sequence of (SEQ ID NO: 59); and/or a light chain variable region comprising the amino acid sequence of (SEQ ID NO: 60).

[0230] In an embodiment, the targeting moiety comprises the anti-PD-L1 antibody 1B12, or fragments thereof, as disclosed in US 2013/0309250 and WO2007/005874, the entire disclosures of which are hereby incorporated by reference. In illustrative embodiments, 1B12 or an antigen-binding fragment thereof for use in the methods provided herein comprises a heavy chain variable region comprising the amino acid sequence of (SEQ ID NO: 61); and/or a light chain variable region comprising the amino acid sequence of (SEQ ID NO: 62).

[0231] In an embodiment, the targeting moiety comprises the anti-PD-L1 antibody 7H1, or fragments thereof, as disclosed in US 2013/0309250 and WO2007/005874, the entire disclosures of which are hereby incorporated by reference.

[0232] In illustrative embodiments, 7H1 or an antigen-binding fragment thereof for use in the methods provided herein comprises a heavy chain variable region comprising the amino acid sequence of (SEQ ID NO: 63); and/or a light chain variable region comprising the amino acid sequence of (SEQ ID NO: 64).

[0233] In an embodiment, the targeting moiety comprises the anti-PD-L1 antibody 11E6, or fragments thereof, as disclosed in US 2013/0309250 and WO2007/005874, the entire disclosures of which are hereby incorporated by reference. In illustrative embodiments, 11E6 or an antigen-binding fragment thereof for use in the methods provided herein comprises a heavy chain variable region comprising the amino acid sequence of (SEQ ID NO: 65); and/or a light chain variable region comprising the amino acid sequence of (SEQ ID NO: 66).

[0234] In an embodiment, the targeting moiety comprises the anti-PD-L1 antibody 12B7, or fragments thereof, as disclosed in US 2013/0309250 and WO2007/005874, the entire disclosures of which are hereby incorporated by reference. In illustrative embodiments, 12B7 or an antigen-binding fragment thereof for use in the methods provided herein comprises a heavy chain variable region comprising the amino acid sequence of (SEQ ID NO: 67); and/or a light chain variable region comprising the amino acid sequence of (SEQ ID NO: 68).

[0235] In an embodiment, the targeting moiety comprises the anti-PD-L1 antibody 13G4, or fragments thereof, as disclosed in US 2013/0309250 and WO2007/005874, the entire disclosures of which are hereby incorporated by reference. In illustrative embodiments, 13G4 or an antigen-binding fragment thereof for use in the methods provided herein comprises a heavy chain variable region comprising the amino acid sequence of (SEQ ID NO: 69); and/or a light chain variable region comprising the amino acid sequence of (SEQ ID NO: 70).

[0236] In an embodiment, the targeting moiety comprises the anti-PD-L1 antibody 1E12, or fragments thereof, as disclosed in US 2014/0044738, the entire disclosures of which are hereby incorporated by reference. In illustrative embodiments, 1E12 or an antigen-binding fragment thereof for use in the methods provided herein comprises a heavy chain variable region comprising the amino acid sequence of (SEQ ID NO: 71); and/or a light chain variable region comprising the amino acid sequence of (SEQ ID NO: 72).

[0237] In an embodiment, the targeting moiety comprises the anti-PD-L1 antibody 1F4, or fragments thereof, as disclosed in US 2014/0044738, the entire disclosures of which are hereby incorporated by reference. In illustrative embodiments, 1F4 or an antigen-binding fragment thereof for use in the methods provided herein comprises a heavy chain variable region comprising the amino acid sequence of (SEQ ID NO: 73); and/or a light chain variable region comprising the amino acid sequence of (SEQ ID NO: 74).

[0238] In an embodiment, the targeting moiety comprises the anti-PD-L1 antibody 2G11, or fragments thereof, as disclosed in US 2014/0044738, the entire disclosures of which are hereby incorporated by reference. In illustrative embodiments, 2G11 or an antigen-binding fragment thereof for use in the methods provided herein comprises a heavy chain variable region comprising the amino acid sequence of (SEQ ID NO: 75); and/or a light chain variable region comprising the amino acid sequence of (SEQ ID NO: 76).

[0239] In an embodiment, the targeting moiety comprises the anti-PD-L1 antibody 3B6, or fragments thereof, as disclosed in US 2014/0044738, the entire disclosures of which are hereby incorporated by reference. In illustrative embodiments, 3B6 or an antigen-binding fragment thereof for use in the methods provided herein comprises a heavy chain variable region comprising the amino acid sequence of (SEQ ID NO: 77); and/or a light chain variable region comprising the amino acid sequence of (SEQ ID NO: 78).

[0240] In an embodiment, the targeting moiety comprises the anti-PD-L1 antibody 3D10, or fragments thereof, as disclosed in US 2014/0044738 and WO2012/145493, the entire disclosures of which are hereby incorporated by reference. In illustrative embodiments, 3D10 or an antigen-binding fragment thereof for use in the methods provided herein comprises a heavy chain variable region comprising the amino acid sequence of (SEQ ID NO: 79); and/or a light chain variable region comprising the amino acid sequence of (SEQ ID NO: 80).

[0241] In an embodiment, the targeting moiety comprises any one of the anti-PD-L1 antibodies disclosed in US2011/0271358 and WO2010/036959, the entire contents of which are hereby incorporated by reference. In illustrative embodiments, the antibody or an antigen-binding fragment thereof for use in the methods provided herein comprises a heavy chain comprising an amino acid sequence selected from SEQ ID Nos: 34-38 of US2011/0271358 (SEQ ID No: 34 of US2011/0271358 (SEQ ID NO: 81); SEQ ID No: 35 of US2011/0271358 (SEQ ID NO: 82); SEQ ID No: 36 of US2011/0271358 (SEQ ID NO: 83); SEQ ID No: 37 of US2011/0271358 (SEQ ID NO: 84); and SEQ ID No: 38 of US2011/0271358 (SEQ ID NO: 85); and/or a light chain comprising an amino acid sequence selected from SEQ ID Nos: 39-42 of US2011/0271358 (SEQ ID No: 39 of US2011/0271358 (SEQ ID NO: 86); SEQ ID No: 40 of US2011/0271358 (SEQ ID NO: 87); SEQ ID No: 41 of US2011/0271358 (SEQ ID NO: 88); and SEQ ID No: 42 of US2011/0271358(SEQ ID NO: 89).

[0242] In an embodiment, the targeting moiety comprises the anti-PD-L1 antibody 2.7A4, or fragments thereof, as disclosed in WO 2011/066389, U.S. Pat. No. 8,779,108, and US2014/0356353, the entire disclosures of which are hereby incorporated by reference. In illustrative embodiments, 2.7A4 or an antigen-binding fragment thereof for use in the methods provided herein comprises a heavy chain variable region comprising the amino acid sequence of SEQ ID No: 2 of WO 2011/066389 (SEQ ID NO: 90); and/or a light chain variable region comprising the amino acid sequence of SEQ ID No: 7 of WO 2011/066389 (SEQ ID NO: 91).

[0243] In an embodiment, the targeting moiety comprises the anti-PD-L1 antibody 2.9D10, or fragments thereof, as disclosed in WO 2011/066389, U.S. Pat. No. 8,779,108, and US2014/0356353, the entire disclosures of which are hereby incorporated by reference. In illustrative embodiments, 2.9D10 or an antigen-binding fragment thereof for use in the methods provided herein comprises a heavy chain variable region comprising the amino acid sequence of SEQ ID No: 12 of WO 2011/066389 (SEQ ID NO: 92); and/or a light chain variable region comprising the amino acid sequence of SEQ ID No: 17 of WO 2011/066389 (SEQ ID NO: 93).

[0244] In an embodiment, the targeting moiety comprises the anti-PD-L1 antibody 2.14H9, or fragments thereof, as disclosed in WO 2011/066389, U.S. Pat. No. 8,779,108, and US2014/0356353, the entire disclosures of which are hereby incorporated by reference. In illustrative embodiments, 2.14H9 or an antigen-binding fragment thereof for use in the methods provided herein comprises a heavy chain variable region comprising the amino acid sequence of SEQ ID No: 22 of WO 2011/066389 (SEQ ID NO: 94); and/or a light chain variable region comprising the amino acid sequence of SEQ ID No: 27 of WO 2011/066389 (SEQ ID NO: 95).

[0245] In an embodiment, the targeting moiety comprises the anti-PD-L1 antibody 2.20A8, or fragments thereof, as disclosed in WO 2011/066389, U.S. Pat. No. 8,779,108, and US2014/0356353, the entire disclosures of which are hereby incorporated by reference. In illustrative embodiments, 2.20A8 or an antigen-binding fragment thereof for use in the methods provided herein comprises a heavy chain variable region comprising the amino acid sequence of SEQ ID No: 32 of WO 2011/066389 (SEQ ID NO: 96); and/or a light chain variable region comprising the amino acid sequence of SEQ ID No: 37 of WO 2011/066389 (SEQ ID NO: 97).

[0246] In an embodiment, the targeting moiety comprises the anti-PD-L1 antibody 3.15G8, or fragments thereof, as disclosed in WO 2011/066389, U.S. Pat. No. 8,779,108, and US2014/0356353, the entire disclosures of which are hereby incorporated by reference. In illustrative embodiments, 3.15G8 or an antigen-binding fragment thereof for use in the methods provided herein comprises a heavy chain variable region comprising the amino acid sequence of SEQ ID No: 42 of WO 2011/066389 (SEQ ID NO: 98); and/or a light chain variable region comprising the amino acid sequence of SEQ ID No: 47 of WO 2011/066389 (SEQ ID NO: 99).

[0247] In an embodiment, the targeting moiety comprises the anti-PD-L1 antibody 3.18G1, or fragments thereof, as disclosed in WO 2011/066389, U.S. Pat. No. 8,779,108, and US2014/0356353, the entire disclosures of which are hereby incorporated by reference. In illustrative embodiments, 3.18G1 or an antigen-binding fragment thereof for use in the methods provided herein comprises a heavy chain variable region comprising the amino acid sequence of SEQ ID No: 52 of WO 2011/066389 (SEQ ID NO: 100); and/or a light chain variable region comprising the amino acid sequence of SEQ ID No: 57 of WO 2011/066389 (SEQ ID NO: 101).

[0248] In an embodiment, the targeting moiety comprises the anti-PD-L1 antibody 2.7A4OPT, or fragments thereof, as disclosed in WO 2011/066389, U.S. Pat. No. 8,779,108, and US2014/0356353, and US2014/0356353, the entire disclosures of which are hereby incorporated by reference. In illustrative embodiments, 2.7A4OPT or an antigen-binding fragment thereof for use in the methods provided herein comprises a heavy chain variable region comprising the amino acid sequence of SEQ ID No: 62 of WO 2011/066389 (SEQ ID NO:102); and/or a light chain variable region comprising the amino acid sequence of SEQ ID No: 67 of WO 2011/066389 (SEQ ID NO:103).

[0249] In an embodiment, the targeting moiety comprises the anti-PD-L1 antibody 2.14H9OPT, or fragments thereof, as disclosed in WO 2011/066389, U.S. Pat. No. 8,779,108, and US2014/0356353, the entire disclosures of which are hereby incorporated by reference. In illustrative embodiments, 2.14H9OPT or an antigen-binding fragment thereof for use in the methods provided herein comprises a heavy chain variable region comprising the amino acid sequence of SEQ ID No: 72 of WO 2011/066389 (SEQ ID NO:104); and/or a light chain variable region comprising the amino acid sequence of SEQ ID No: 77 of WO 2011/066389 (SEQ ID NO:105).

[0250] In an embodiment, the targeting moiety comprises any one of the anti-PD-L1 antibodies disclosed in WO2016/061142, the entire contents of which are hereby incorporated by reference. In illustrative embodiments, the antibody or an antigen-binding fragment thereof for use in the methods provided herein comprises a heavy chain comprising an amino acid sequence selected from SEQ ID Nos: 18, 30, 38, 46, 50, 54, 62, 70, and 78 of WO2016/061142 (SEQ ID No: 18 of WO2016/061142 (SEQ ID NO:106); SEQ ID No: 30 of WO2016/061142 (SEQ ID NO: 107); SEQ ID No: 38 of WO2016/061142 (SEQ ID NO: 108); SEQ ID No: 46 of WO2016/061142 (SEQ ID NO:109); SEQ ID No: 50 of WO2016/061142 (SEQ ID NO:110); SEQ ID No: 54 of WO2016/061142 (SEQ ID NO:111); SEQ ID No: 62 of WO2016/061142 (SEQ ID NO:112); SEQ ID No: 70 of WO2016/061142 (SEQ ID NO: 113); and SEQ ID No: 78 of WO2016/061142 (SEQ ID NO:114)); and/or a light chain comprising an amino acid sequence selected from SEQ ID Nos: 22, 26, 34, 42, 58, 66, 74, 82, and 86 of WO2016/061142 (SEQ ID No: 22 of WO2016/061142 (SEQ ID NO:115); SEQ ID No: 26 of WO2016/061142 (SEQ ID NO:116); SEQ ID No: 34 of WO2016/061142 (SEQ ID NO:117); SEQ ID No: 42 of WO2016/061142 (SEQ ID NO:118); SEQ ID No: 58 of WO2016/061142 (SEQ ID NO:119); SEQ ID No: 66 of WO2016/061142(SEQ ID NO:120); SEQ ID No: 74 of WO2016/061142 (SEQ ID NO:121); SEQ ID No: 82 of WO2016/061142 (SEQ ID NO:122); and SEQ ID No: 86 of WO2016/061142 (SEQ ID NO:123).

[0251] In an embodiment, the targeting moiety comprises any one of the anti-PD-L1 antibodies disclosed in WO2016/022630, the entire contents of which are hereby incorporated by reference. In illustrative embodiments, the antibody or an antigen-binding fragment thereof for use in the methods provided herein comprises a heavy chain comprising an amino acid sequence selected from SEQ ID Nos: 2, 6, 10, 14, 18, 22, 26, 30, 34, 38, 42, and 46 of WO2016/022630 (SEQ ID No: 2 of WO2016/022630 (SEQ ID NO:124); SEQ ID No: 6 of WO2016/022630 (SEQ ID NO:125); SEQ ID No: 10 of WO2016/022630 (SEQ ID NO: 126); SEQ ID No: 14 of WO2016/022630 (SEQ ID NO: 127); SEQ ID No: 18 of WO2016/022630 (SEQ ID NO:128); SEQ ID No: 22 of WO2016/022630 (SEQ ID NO:129); SEQ ID No: 26 of WO2016/022630 (SEQ ID NO: 130); SEQ ID No: 30 of WO2016/022630 (SEQ ID NO:131); SEQ ID No: 34 of WO2016/022630 (SEQ ID NO:132); SEQ ID No: 38 of WO2016/022630 (SEQ ID NO:133); SEQ ID No: 42 of WO2016/022630 (SEQ ID NO: 134); and SEQ ID No: 46 of WO2016/022630 (SEQ ID NO: 135); and/or a light chain comprising an amino acid sequence selected from SEQ ID Nos: 4, 8, 12, 16, 20, 24, 28, 32, 36, 40, 44, and 48 of WO2016/022630 (SEQ ID No: 4 of WO2016/022630 (SEQ ID NO:136); SEQ ID No: 8 of WO2016/022630 (SEQ ID NO:137); SEQ ID No: 12 of WO2016/022630 (SEQ ID NO:138); SEQ ID No: 16 of

[0252] WO2016/022630 (SEQ ID NO:139); SEQ ID No: 20 of WO2016/022630 (SEQ ID NO:140); SEQ ID No: 24 of WO2016/022630 (SEQ ID NO:141); SEQ ID No: 28 of WO2016/022630 (SEQ ID NO:142); SEQ ID No: 32 of WO2016/022630 (SEQ ID NO:143); SEQ ID No: 36 of WO2016/022630 (SEQ ID NO:144); SEQ ID No: 40 of WO2016/022630 (SEQ ID NO:145); SEQ ID No: 44 of WO2016/022630 (SEQ ID NO:146); and SEQ ID No: 48 of WO2016/022630 (SEQ ID NO:147)).

[0253] In an embodiment, the targeting moiety comprises any one of the anti-PD-L1 antibodies disclosed in WO2015/112900, the entire contents of which are hereby incorporated by reference. In illustrative embodiments, the antibody or an antigen-binding fragment thereof for use in the methods provided herein comprises a heavy chain comprising an amino acid sequence selected from SEQ ID Nos: 38, 50, 82, and 86 of WO 2015/112900 (SEQ ID No: 38 of WO2015/112900 (SEQ ID NO:148); SEQ ID No: 50 of WO 2015/112900 (SEQ ID NO:149); SEQ ID No: 82 of WO 2015/112900 (SEQ ID NO:150); and SEQ ID No: 86 of WO 2015/112900 (SEQ ID NO:151)); 20) and/or a light chain comprising an amino acid sequence selected from SEQ ID Nos: 42, 46, 54, 58, 62, 66, 70, 74, and 78 of WO 2015/112900 (SEQ ID No: 42 of WO2015/112900 (SEQ ID NO:152); SEQ ID No: 46 of WO 2015/112900: (SEQ ID NO:153); SEQ ID No: 54 of WO 2015/112900 (SEQ ID NO:154); SEQ ID No: 58 of WO 2015/112900 (SEQ ID NO:155); SEQ ID No: 62 of WO 2015/112900 (SEQ ID NO:156); SEQ ID No: 66 of WO 2015/112900 (SEQ ID NO:157); SEQ ID No: 70 of WO 2015/112900 (SEQ ID NO:158); SEQ ID No: 74 of WO 2015/112900 (SEQ ID NO:159); and SEQ ID No: 78 of WO 2015/112900 (SEQ ID NO:160)).

[0254] In an embodiment, the targeting moiety comprises any one of the anti-PD-L1 antibodies disclosed in WO 2010/077634 and U.S. Pat. No. 8,217,149, the entire disclosures of which are hereby incorporated by reference. In illustrative embodiments, the anti-PD-L1 antibody or an antigen-binding fragment thereof for use in the methods provided herein comprises a heavy chain region comprising the amino acid sequence of SEQ ID No: 20 of WO 2010/077634 (SEQ ID NO: 161); and/or a light chain variable region comprising the amino acid sequence of SEQ ID No: 21 of WO 2010/077634 (SEQ ID NO: 162).

[0255] In an embodiment, the targeting moiety comprises any one of the anti-PD-L1 antibodies obtainable from the hybridoma accessible under CNCM deposit numbers CNCM I-4122, CNCM I-4080 and CNCM I-4081 as disclosed in US 20120039906, the entire disclosures of which are hereby incorporated by reference.

[0256] In an embodiment, the targeting moiety comprises a VHH directed against PD-L1 as disclosed, for example, in U.S. Pat. No. 8,907,065 and WO 2008/071447, the entire disclosures of which are hereby incorporated by reference. In illustrative embodiments, the VHHs against PD-L1 comprise SEQ ID NOS: 394-399 of U.S. Pat. No. 8,907,065 (SEQ ID No: 394 of U.S. Pat. No. 8,907,065 (SEQ ID NO:163); SEQ ID No: 395 of U.S. Pat. No. 8,907,065 (SEQ ID NO:164); SEQ ID No: 396 of U.S. Pat. No. 8,907,065 (SEQ ID NO:165); SEQ ID No: 397 of U.S. Pat. No. 8,907,065 (SEQ ID NO:166); SEQ ID No: 398 of U.S. Pat. No. 8,907,065 (SEQ ID NO:167); and SEQ ID No: 399 of U.S. Pat. No. 8,907,065 (SEQ ID NO:168).

[0257] In various embodiments, the present chimeric proteins or chimeric protein complexes such as Fc-based chimeric protein complexes have one or more targeting moieties directed against PD-L2. In some embodiments, the chimeric proteins or chimeric protein complexes such as Fc-based chimeric protein complexes have one or more targeting moieties which selectively bind a PD-L2 polypeptide. In some embodiments, the chimeric proteins or chimeric protein complexes such as Fc-based chimeric protein complexes comprise one or more antibodies, antibody derivatives or formats, peptides or polypeptides, or fusion proteins that selectively bind a PD-L2 polypeptide.

[0258] In an embodiment, the targeting moiety comprises a VHH directed against PD-L2 as disclosed, for example, in U.S. Pat. No. 8,907,065 and WO 2008/071447, the entire disclosures of which are hereby incorporated by reference. In illustrative embodiments, the VHHs against PD-L2 comprise SEQ ID Nos: 449-455 of U.S. Pat. No. 8,907,065 (SEQ ID No: 449 of U.S. Pat. No. 8,907,065 (SEQ ID NO:169); SEQ ID No: 450 of U.S. Pat. No. 8,907,065 (SEQ ID NO:170); SEQ ID No: 451 of U.S. Pat. No. 8,907,065 (SEQ ID NO:171); SEQ ID No: 452 of U.S. Pat. No. 8,907,065 (SEQ ID NO:172); SEQ ID No: 453 of U.S. Pat. No. 8,907,065 (SEQ ID NO:173); SEQ ID No: 454 of U.S. Pat. No. 8,907,065 (SEQ ID NO:174); and SEQ ID No: 455 of U.S. Pat. No. 8,907,065 (SEQ ID NO:175)).

[0259] In an embodiment, the targeting moiety comprises any one of the anti-PD-L2 antibodies disclosed in US2011/0271358 and WO2010/036959, the entire contents of which are hereby incorporated by reference. In illustrative embodiments, the antibody or an antigen-binding fragment thereof for use in the methods provided herein comprises a heavy chain comprising an amino acid sequence selected from SEQ ID Nos: 43-47 of US2011/0271358 (SEQ ID No: 43 of US2011/0271358 (SEQ ID NO:176); SEQ ID No: 44 of US2011/0271358 (SEQ ID NO:177); SEQ ID No: 45 of US2011/0271358 (SEQ ID NO:178); SEQ ID No: 46 of US2011/0271358 (SEQ ID NO:179); and SEQ ID No: 47 of US2011/0271358 (SEQ ID NO:180)); and/or a light chain comprising an amino acid sequence selected from SEQ ID Nos: 48-51 of US2011/0271358 (SEQ ID No: 48 of US2011/0271358 (SEQ ID NO:181); SEQ ID No: 49 of US2011/0271358 (SEQ ID NO:182); SEQ ID No: 50 of US2011/0271358 (SEQ ID NO:183); and SEQ ID No: 51 of US2011/0271358 (SEQ ID NO:184)).

[0260] In various embodiments, the targeting moieties of the invention may comprise a sequence that targets PD-1, PD-L1, and/or PD-L2 which is at least about 60%, at least about 61%, at least about 62%, at least about 63%, at least about 64%, at least about 65%, at least about 66%, at least about 67%, at least about 68%, at least about 69%, at least about 70%, at least about 71%, at least about 72%, at least about 73%, at least about 74%, at least about 75%, at least about 76%, at least about 77%, at least about 78%, at least about 79%, at least about 80%, at least about 81%, at least about 82%, at least about 83%, at least about 84%, at least about 85%, at least about 86%, at least about 87%, at least about 88%, at least about 89%, at least about 90%, at least about 91%, at least about 92%, at least about 93%, at least about 94%, at least about 95%, at least about 96%, at least about 97%, at least about 98%, at least about 99%, or 100% identical to any of the sequences disclosed herein (e.g. about 60%, or about 61%, or about 62%, or about 63%, or about 64%, or about 65%, or about 66%, or about 67%, or about 68%, or about 69%, or about 70%, or about 71%, or about 72%, or about 73%, or about 74%, or about 75%, or about 76%, or about 77%, or about 78%, or about 79%, or about 80%, or about 81%, or about 82%, or about 83%, or about 84%, or about 85%, or about 86%, or about 87%, or about 88%, or about 89%, or about 90%, or about 91%, or about 92%, or about 93%, or about 94%, or about 95%, or about 96%, or about 97%, or about 98%, about 99% or about 100% sequence identity with any of the sequences disclosed herein.

[0261] In various embodiments, the targeting moieties of the invention may comprise any combination of heavy chain, light chain, heavy chain variable region, light chain variable region, complementarity determining region (CDR), and framework region sequences that target PD-1, PD-L1, and/or PD-L2 as disclosed herein.

[0262] Additional antibodies, antibody derivatives or formats, peptides or polypeptides, or fusion proteins that selectively bind or target PD-1, PD-L1 and/or PD-L2 are disclosed in WO 2011/066389, US 2008/0025980, US 2013/0034559, U.S. Pat. No. 8,779,108, US 2014/0356353, U.S. Pat. No. 8,609,089, US 2010/028330, US 2012/0114649, WO 2010/027827, WO 2011,/066342, U.S. Pat. No. 8,907,065, WO 2016/062722, WO 2009/101611, WO2010/027827, WO 2011/066342, WO 2007/005874, WO 2001/014556, US2011/0271358, WO 2010/036959, WO 2010/077634, U.S. Pat. No. 8,217,149, US 2012/0039906, WO 2012/145493, US 2011/0318373, U.S. Pat. No. 8,779,108, US 20140044738, WO 2009/089149, WO 2007/00587, WO 2016061142, WO 2016,02263, WO 2010/077634, and WO 2015/112900, the entire disclosures of which are hereby incorporated by reference.

[0263] In one embodiment, the present chimeric proteins or chimeric protein complexes, such as Fc-based chimeric protein complexes, have a targeting moiety directed against a T cell, for example, mediated by targeting to CD8, along with any of the signaling agents (e.g., a modified IL-2) described herein. In an embodiment, the present chimeric proteins or chimeric protein complexes, such as Fc-based chimeric protein complexes, have a targeting moiety directed against CD8 on T cells.

[0264] In an embodiment, the targeting moiety directed against CD8 comprises a VHH comprising the amino acid sequence of:

(SEQ ID NO: 454)
EVQLVESGGGLVQPGGSLRLSCAASGFTFEDYAIGWFRQAPGKGREGVAC
IRIFDRHTYYADSVKGRFTISSDNSKNTVYLQMNSLRAEDTATYYCAAGS
FFGCTRPEGDMDYFGQGTLVQVQSA.

[0265] In an embodiment, the targeting moiety directed against CD8 comprises a VHH comprising the amino acid sequence of:

(SEQ ID NO: 455)
EVQLVESGGGLVQPGGSLRLSCAASGFTFDDYVIGWFRQAPGKGREGVAC
IRIFDRHTYYADSVKGRFTISSDNSKNTVYLQMNSLRAEDTATYYCAAGS
FFGCTRPEGDMDYFGQGTLVQVQSA.

[0266] In an embodiment, the targeting moiety directed against CD8 comprises a VHH comprising the amino acid sequence of:

(SEQ ID NO: 456)
EVQLVESGGGLVQPGGSLRLSCAASGFTFDDYAIGWFRQAPGKGREGVAC
IRIFDRHTYYADSVKGRFTISSDNSKNTVYLQMNSLRAEDTATYYCAAGS
FWGCTRPEGDMDYFGQGTLVQVQSA.

[0267] In various embodiments, the targeting moieties of the invention may comprise a sequence that targets CD8 which is at least about 60%, at least about 61%, at least about 62%, at least about 63%, at least about 64%, at least about 65%, at least about 66%, at least about 67%, at least about 68%, at least about 69%, at least about 70%, at least about 71%, at least about 72%, at least about 73%, at least about 74%, at least about 75%, at least about 76%, at least about 77%, at least about 78%, at least about 79%, at least about 80%, at least about 81%, at least about 82%, at least about 83%, at least about 84%, at least about 85%, at least about 86%, at least about 87%, at least about 88%, at least about 89%, at least about 90%, at least about 91%, at least about 92%, at least about 93%, at least about 94%, at least about 95%, at least about 96%, at least about 97%, at least about 98%, at least about 99%, or 100% identical to any of the sequences disclosed herein (e.g. about 60%, or about 61%, or about 62%, or about 63%, or about 64%, or about 65%, or about 66%, or about 67%, or about 68%, or about 69%, or about 70%, or about 71%, or about 72%, or about 73%, or about 74%, or about 75%, or about 76%, or about 77%, or about 78%, or about 79%, or about 80%, or about 81%, or about 82%, or about 83%, or about 84%, or about 85%, or about 86%, or about 87%, or about 88%, or about 89%, or about 90%, or about 91%, or about 92%, or about 93%, or about 94%, or about 95%, or about 96%, or about 97%, or about 98%, about 99% or about 100% sequence identity with any of the sequences disclosed herein).

[0268] In one embodiment, the present chimeric proteins or chimeric protein complexes such as Fc-based chimeric protein complexes have a targeting moiety directed against a T cell, for example, mediated by targeting to CD4, along with any of the signaling agents (e.g., a modified IL-2) described herein. In an embodiment, the present chimeric proteins or chimeric protein complexes, such as Fc-based chimeric protein complexes, have a targeting moiety directed against CD4 on T cells.

[0269] In one embodiment, the present chimeric proteins or chimeric protein complexes, such as Fc-based chimeric protein complexes, have a targeting moiety directed against a T cell, for example, mediated by targeting to CD3, CXCR3, CCR4, CCR9, CD70, CD103, or one or more immune checkpoint markers, along with any of the signaling agents (e.g., modified IL-2) described herein. In an embodiment, the present chimeric proteins or chimeric protein complexes such as Fc-based chimeric protein complexes have a targeting moiety directed against CD3 on T cells and a second targeting moiety directed against PD-L1 or PD-L2 on tumor cells.

[0270] In some embodiments, the present chimeric proteins or chimeric protein complexes such as Fc-based chimeric protein complexes have one or more targeting moieties directed against CD3 expressed on T cells. In some embodiments, the chimeric proteins or chimeric protein complexes such as Fc-based chimeric protein complexes have one or more targeting moieties which selectively bind a CD3 polypeptide. In some embodiments, the chimeric proteins or chimeric protein complexes such as Fc-based chimeric protein complexes comprise one or more antibodies, antibody derivatives or formats, peptides or polypeptides, or fusion proteins that selectively bind a CD3 polypeptide.

[0271] In an embodiment, the targeting moiety comprises the anti-CD3 antibody muromonab-CD3 (aka Orthoclone OKT3), or fragments thereof. Muromonab-CD3 is disclosed in U.S. Pat. No. 4,361,549 and Wilde et al. (1996) 51:865-894, the entire disclosures of which are hereby incorporated by reference. In illustrative embodiments, muromonab-CD3 or an antigen-binding fragment thereof for use in the methods provided herein comprises a heavy chain comprising the amino acid sequence of (SEQ ID NO:185); and/or a light chain comprising the amino acid sequence of (SEQ ID NO:186).

[0272] In an embodiment, the targeting moiety comprises the anti-CD3 antibody otelixizumab, or fragments thereof. Otelixizumab is disclosed in U.S. Patent Publication No. 20160000916 and Chatenoud et al. (2012) 9:372-381, the entire disclosures of which are hereby incorporated by reference. In illustrative embodiments, otelixizumab or an antigen-binding fragment thereof for use in the methods provided herein comprises a heavy chain comprising the amino acid sequence of: SEQ ID NO: 187; and/or a light chain comprising the amino acid sequence of SEQ ID NO:188.

[0273] In an embodiment, the targeting moiety comprises the anti-CD3 antibody teplizumab (AKA MGA031 and hOKT3γ1(Ala-Ala), or fragments thereof. Teplizumab is disclosed in Chatenoud et al. (2012) 9:372-381, the entire disclosures of which are hereby incorporated by reference. In illustrative embodiments, teplizumab or an antigen-binding fragment thereof for use in the methods provided herein comprises a heavy chain comprising the amino acid sequence of SEQ ID NO: 189; and/or a light chain comprising the amino acid sequence of SEQ ID NO: 190.

[0274] In an embodiment, the targeting moiety comprises the anti-CD3 antibody visilizumab (AKA Nuvion®; HuM291), or fragments thereof. Visilizumab is disclosed in U.S. Pat. No. 5,834,597 and WO2004052397, and Cole et al., Transplantation (1999) 68:563-571, the entire disclosures of which are hereby incorporated by reference. In illustrative embodiments, visilizumab or an antigen-binding fragment thereof for use in the methods provided herein comprises a heavy chain variable region comprising the amino acid sequence of SEQ ID NO: 191; and/or a light chain variable region comprising the amino acid sequence of SEQ ID NO: 192.

[0275] In an embodiment, the targeting moiety comprises the anti-CD3 antibody foralumab (aka NI-0401), or fragments thereof. In various embodiments, the targeting moiety comprises any one of the anti-CD3 antibodies disclosed in US20140193399, U.S. Pat. No. 7,728,114, US20100183554, and U.S. Pat. No. 8,551,478, the entire disclosures of which are hereby incorporated by reference.

[0276] In illustrative embodiments, the anti-CD3 antibody or an antigen-binding fragment thereof for use in the methods provided herein comprises a heavy chain variable region comprising the amino acid sequence of SEQ ID Nos: 2 and 6 of U.S. Pat. No. 7,728,114 (SEQ ID No: 2 of U.S. Pat. No. 7,728,114 (SEQ ID NO:193) and SEQ ID No: 6 of U.S. Pat. No. 7,728,114 (SEQ ID NO: 194); and/or a light chain variable region comprising the amino acid sequence of SEQ ID NOs 4 and 8 of U.S. Pat. No. 7,728,114 (SEQ ID No: 4 of U.S. Pat. No. 7,728,114 (SEQ ID NO:195) and SEQ ID No: 8 of U.S. Pat. No. 7,728,114 (SEQ ID NO:196).

[0277] In an embodiment, the targeting moiety comprises a heavy chain variable region comprising the amino acid sequence of SEQ ID NO:2 of U.S. Pat. No. 7,728,114 and a light chain variable region comprising the amino acid sequence of SEQ ID NO:4 of U.S. Pat. No. 7,728,114. In an embodiment, the targeting moiety comprises any one of the anti-CD3 antibodies disclosed in US2016/0168247, the entire contents of which are hereby incorporated by reference. In illustrative embodiments, the antibody or an antigen-binding fragment thereof for use in the methods provided herein comprises a heavy chain comprising an amino acid sequence selected from SEQ ID Nos: 6-9 of US2016/0168247 (SEQ ID No: 6 of US2016/0168247 (SEQ ID NO:197); SEQ ID No: 7 of US2016/0168247 (SEQ ID NO: 198); SEQ ID No: 8 of US2016/0168247 (SEQ ID NO: 199); and SEQ ID No: 9 of US2016/0168247 (SEQ ID NO:200)); and/or a light chain comprising an amino acid sequence selected from SEQ ID Nos: 10-12 of US2016/0168247 (SEQ ID No: 10 of US2016/0168247 (SEQ ID NO:201); SEQ ID No: 11 of US2016/0168247 (SEQ ID NO:202); and SEQ ID No: 12 of US2016/0168247 (SEQ ID NO:203).

[0278] In an embodiment, the targeting moiety comprises any one of the anti-CD3 antibodies disclosed in US2015/0175699, the entire contents of which are hereby incorporated by reference. In illustrative embodiments, the antibody or an antigen-binding fragment thereof for use in the methods provided herein comprises a heavy chain comprising an amino acid sequence selected from SEQ ID No: 9 of US2015/0175699 (SEQ ID NO:204); and/or a light chain comprising an amino acid sequence selected from SEQ ID No: 10 of US2015/0175699 (SEQ ID NO:205).

[0279] In an embodiment, the targeting moiety comprises any one of the anti-CD3 antibodies disclosed in U.S. Pat. No. 8,784,821, the entire contents of which are hereby incorporated by reference. In illustrative embodiments, the antibody or an antigen-binding fragment thereof for use in the methods provided herein comprises a heavy chain comprising an amino acid sequence selected from SEQ ID Nos: 2, 18, 34, 50, 66, 82, 98 and 114 of U.S. Pat. No. 8,784,821 (SEQ ID No: 2 of U.S. Pat. No. 8,784,821 (SEQ ID NO:206); SEQ ID No: 18 of U.S. Pat. No. 8,784,821 (SEQ ID NO:207); SEQ ID No: 34 of U.S. Pat. No. 8,784,821 (SEQ ID NO:208); SEQ ID No: 50 of U.S. Pat. No. 8,784,821 (SEQ ID NO:209); SEQ ID No: 66 of U.S. Pat. No. 8,784,821 (SEQ ID NO:210); SEQ ID No: 82 of U.S. Pat. No. 8,784,821 (SEQ ID NO:211); SEQ ID No: 98 of U.S. Pat. No. 8,784,821 (SEQ ID NO:212); and SEQ ID No: 114 of U.S. Pat. No. 8,784,821 (SEQ ID NO:213)); and/or a light chain comprising an amino acid sequence selected from SEQ ID Nos: 10, 26, 42, 58, 74, 90, 106 and 122 of U.S. Pat. No. 8,784,821 (SEQ ID No: 10 of U.S. Pat. No. 8,784,821 (SEQ ID NO:214); SEQ ID No: 26 of U.S. Pat. No. 8,784,821 (SEQ ID NO:215); SEQ ID No: 42 of U.S. Pat. No. 8,784,821 (SEQ ID NO:216); SEQ ID No: 58 of U.S. Pat. No. 8,784,821 (SEQ ID NO:217); SEQ ID No: 74 of U.S. Pat. No. 8,784,821 (SEQ ID NO:218); SEQ ID No: 90 of U.S. Pat. No. 8,784,821 (SEQ ID NO:219); SEQ ID No: 106 of U.S. Pat. No. 8,784,821 (SEQ ID NO:220); and SEQ ID No: 122 of U.S. Pat. No. 8,784,821 (SEQ ID NO:221).

[0280] In an embodiment, the targeting moiety comprises any one of the anti-CD3 binding constructs disclosed in US20150118252, the entire contents of which are hereby incorporated by reference. In illustrative embodiments, the antibody or an antigen-binding fragment thereof for use in the methods provided herein comprises a heavy chain comprising an amino acid sequence selected from SEQ ID Nos: 6 and 86 of US20150118252 (SEQ ID No: 6 of US20150118252 (SEQ ID NO:222) and SEQ ID No: 86 of US20150118252 (SEQ ID NO:223)) and/or a light chain comprising an amino acid sequence selected from SEQ ID No: 3 of US2015/0175699 (SEQ ID No: 3 of US20150118252 (SEQ ID NO:224)).

[0281] In an embodiment, the targeting moiety comprises any one of the anti-CD3 binding proteins disclosed in US2016/0039934, the entire contents of which are hereby incorporated by reference. In illustrative embodiments, the antibody or an antigen-binding fragment thereof for use in the methods provided herein comprises a heavy chain comprising an amino acid sequence selected from SEQ ID Nos: 6-9 of US2016/0039934 (SEQ ID No: 6 of US2016/0039934 (SEQ ID NO:225); SEQ ID No: 7 of US2016/0039934 (SEQ ID NO:226); SEQ ID No: 8 of US2016/0039934 (SEQ ID NO:227); and SEQ ID No: 9 of US2016/0039934 (SEQ ID NO:228)); and/or a light chain comprising an amino acid sequence selected from SEQ ID Nos: 1-4 of US2016/0039934 (SEQ ID No: 1 of US2016/0039934 (SEQ ID NO:229); SEQ ID No: 2 of US2016/0039934 (SEQ ID NO:230); SEQ ID No: 3 of US2016/0039934 (SEQ ID NO:231); and SEQ ID No: 4 of US2016/0039934 (SEQ ID NO:232).

[0282] In various embodiments, the targeting moieties of the invention may comprise a sequence that targets CD3 which is at least about 60%, at least about 61%, at least about 62%, at least about 63%, at least about 64%, at least about 65%, at least about 66%, at least about 67%, at least about 68%, at least about 69%, at least about 70%, at least about 71%, at least about 72%, at least about 73%, at least about 74%, at least about 75%, at least about 76%, at least about 77%, at least about 78%, at least about 79%, at least about 80%, at least about 81%, at least about 82%, at least about 83%, at least about 84%, at least about 85%, at least about 86%, at least about 87%, at least about 88%, at least about 89%, at least about 90%, at least about 91%, at least about 92%, at least about 93%, at least about 94%, at least about 95%, at least about 96%, at least about 97%, at least about 98%, at least about 99%, or 100% identical to any of the sequences disclosed herein (e.g. about 60%, or about 61%, or about 62%, or about 63%, or about 64%, or about 65%, or about 66%, or about 67%, or about 68%, or about 69%, or about 70%, or about 71%, or about 72%, or about 73%, or about 74%, or about 75%, or about 76%, or about 77%, or about 78%, or about 79%, or about 80%, or about 81%, or about 82%, or about 83%, or about 84%, or about 85%, or about 86%, or about 87%, or about 88%, or about 89%, or about 90%, or about 91%, or about 92%, or about 93%, or about 94%, or about 95%, or about 96%, or about 97%, or about 98%, about 99% or about 100% sequence identity with any of the sequences disclosed herein).

[0283] In various embodiments, the targeting moieties of the invention may comprise any combination of heavy chain, light chain, heavy chain variable region, light chain variable region, complementarity determining region (CDR), and framework region sequences that target CD3 as disclosed herein. In various embodiments, the targeting moieties of the invention may comprise any heavy chain, light chain, heavy chain variable region, light chain variable region, complementarity determining region (CDR), and framework region sequences of the CD3-specific antibodies including, but not limited to, X35-3, VIT3, BMA030 (BW264/56), CLB-T3/3, CRIS7, YTH12.5, FI 11-409, CLB-T3.4.2, TR-66, WT32, SPv-T3b, 11D8, XIII-141, XIII-46, XIII-87, 12F6, T3/RW2-8C8, T3/RW2-4B6, OKT3D, M-T301, SMC2, WT31 and F101.01. These CD3-specific antibodies are well known in the art and, inter alia, described in Tunnacliffe (1989), Int. Immunol. 1, 546-550, the entire disclosures of which are hereby incorporated by reference.

[0284] Additional antibodies, antibody derivatives or formats, peptides or polypeptides, or fusion proteins that selectively bind or target CD3 are disclosed in US Patent Publication No. 2016/0000916, U.S. Pat. Nos. 4,361,549, 5,834,597, 6,491,916, 6,406,696, 6,143,297, 6,750,325 and International Publication No. WO 2004/052397, the entire disclosures of which are hereby incorporated by reference.

[0285] In one embodiment, the present chimeric proteins or chimeric protein complexes such as Fc-based chimeric protein complexes have (a targeting moiety directed against a T cell, for example, mediated by targeting to PD-1, along with any of the signaling agents (e.g., a modified IL-2) described herein.

[0286] By way of non-limiting example, in various embodiments, the present chimeric proteins or chimeric protein complexes such as Fc-based chimeric protein complexes have a targeting moiety directed against a B cell, for example, mediated by targeting to CD10, CD19, CD20, CD21, CD22, CD23, CD24, CD37, CD38, CD39, CD40, CD70, CD72, CD73, CD74, CDw75, CDw76, CD77, CD78, CD79a/b, CD80, CD81, CD82, CD83, CD84, CD85, CD86, CD89, CD98, CD126, CD127, CDw130, CD138, or CDw150; along with any of the signaling agents (e.g., a modified IL-2) described herein. In an embodiment, the present chimeric proteins or chimeric protein complexes such as Fc-based chimeric protein complexes have a targeting moiety directed against CD20.

[0287] In one embodiment, the present chimeric proteins or chimeric protein complexes such as Fc-based chimeric protein complexes have a targeting moiety directed against a B cell, for example, mediated by targeting to CD19, CD20 or CD70, along with any of the signaling agents (e.g., a modified IL-2) described herein.

[0288] In one embodiment, the present chimeric proteins or chimeric protein complexes such as Fc-based chimeric protein complexes have a targeting moiety directed against a B cell, for example, mediated by targeting to CD20, along with any of the signaling agents (e.g., a modified IL-2) described herein. In an embodiment, the present chimeric proteins or chimeric protein complexes such as Fc-based chimeric protein complexes have a targeting moiety directed against CD20 on B cells and a second targeting moiety directed against PD-L1 or PD-L2 on tumor cells. By way of example, in some embodiments, the CD20 targeting moiety is a recombinant heavy-chain-only antibody (VHH) having the sequence of:

(SEQ ID NO: 288)
QVQLQESGGGLAQAGGSLRLSCAASGRTFSMGWFRQAPGKEREFVAAITY
SGGSPYYASSVRGRFTISRDNAKNTVYLQMNSLKPEDTAVYYCAANPTYG
SDWNAENWGQGTQVTVSS.

[0289] By way of non-limiting example, in various embodiments, the present chimeric proteins or chimeric protein complexes such as Fc-based chimeric protein complexes have a targeting moiety directed against a NK cell, for example, mediated by targeting to 2B4/SLAMF4, KIR2DS4, CD155/PVR, KIR3DL1, CD94, LMIR1/CD300A, CD69, LMIR2/CD300c, CRACC/SLAMF7, LMIR3/CD300LF, DNAM-1, LMIR5/CD300LB, Fc-epsilon RII, LMIR6/CD300LE, Fc-γ RI/CD64, MICA, Fc-γ RIIB/CD32b, MICB, Fc-γ RIIC/CD32c, MULT-1, Fc-γ RIIA/CD32a, Nectin-2/CD112, Fc-γ RIII/CD16, NKG2A, FcRH1/IRTA5, NKG2C, FcRH2/IRTA4, NKG2D, FcRH4/IRTA1, NKp30, FcRH5/IRTA2, NKp44, Fc-Receptor-like 3/CD16-2, NKp46/NCR1, NKp80/KLRF1, NTB-A/SLAMF6, Rae-1, Rae-1 a, Rae-1 B, Rae-1 delta, H60, Rae-1 epsilon, ILT2/CD85j, Rae-1 γ, ILT3/CD85k, TREM-1, ILT4/CD85d, TREM-2, ILT5/CD85a, TREM-3, KIR/CD158, TREML1/TLT-1, KIR2DL1, ULBP-1, KIR2DL3, ULBP-2, KIR2DL4/CD158d, or ULBP-3; along with any of the signaling agents (e.g., a modified IL-2) described herein.

[0290] In one embodiment, the present chimeric proteins or chimeric protein complexes such as Fc-based chimeric protein complexes have a targeting moiety directed against a NK cell, for example, mediated by targeting to Kir1alpha, DNAM-1 or CD64, along with any of the signaling agents (e.g., a modified IL-2) described herein.

[0291] In one embodiment, the present chimeric proteins or chimeric protein complexes such as Fc-based chimeric protein complexes have a targeting moiety directed against a NK cell, for example, mediated by targeting to TIGIT or KIR1, along with any of the signaling agents (e.g., a modified IL-2) described herein. In an embodiment, the present chimeric proteins or chimeric protein complexes such as Fc-based chimeric protein complexes have a targeting moiety directed against TIGIT on NK cells and a second targeting moiety directed against PD-L1 or PD-L2 on tumor cells.

[0292] By way of non-limiting example, in various embodiments, the present chimeric proteins or chimeric protein complexes such as Fc-based chimeric protein complexes have a targeting moiety directed against a dendritic cell, for example, mediated by targeting to CLEC-9A, XCR1, RANK, CD36/SRB3, LOX-1/SR-E1, CD68, MARCO, CD163, SR-A1/MSR, CD5L, SREC-1, CL-PI/COLEC12, SREC-II, LIMPIIISRB2, RP105, TLR4, TLR1, TLR5, TLR2, TLR6, TLR3, TLR9, 4-IBB Ligand/TNFSF9, IL-12/IL-23 p40, 4-Amino-1,8-naphthalimide, ILT2/CD85j, CCL21/6Ckine, ILT3/CD85k, 8-oxo-dG, ILT4/CD85d, 8D6A, ILT5/CD85a, A2B5, Integrin α 4/CD49d, Aag, Integrin β 2/CD18, AMICA, Langerin, B7-2/CD86, Leukotriene B4 RI, B7-H3, LMIR1/CD300A, BLAME/SLAMF8, LMIR2/CD300c, Clq R1/CD93, LMIR3/CD300LF, CCR6, LMIR5/CD300LB CCR7, LMIR6/CD300LE, CD40/TNFRSF5, MAG/Siglec-4-a, CD43, MCAM, CD45, MD-1, CD68, MD-2, CD83, MDL-1/CLEC5A, CD84/SLAMF5, MMR, CD97, NCAMLI, CD2F-10/SLAMF9, Osteoactivin GPNMB, Chern 23, PD-L2, CLEC-1, RP105, CLEC-2, Siglec-2/CD22, CRACC/SLAMF7, Siglec-3/CD33, DC-SIGN, Siglec-5, DC-SIGNR/CD299, Siglec-6, DCAR, Siglec-7, DCIR/CLEC4A, Siglec-9, DEC-205, Siglec-10, Dectin-1/CLEC7A, Siglec-F, Dectin-2/CLEC6A, SIGNR1/CD209, DEP-1/CD148, SIGNR4, DLEC, SLAM, EMMPRIN/CD147, TCCR/WSX-1, Fc-γ R1/CD64, TLR3, Fc-γ RIIB/CD32b, TREM-1, Fc-γ RIIC/CD32c, TREM-2, Fc-γ RIIA/CD32a, TREM-3, Fc-γ RIII/CD16, TREML1/TLT-1, ICAM-2/CD102, or Vanilloid R1; along with any of the signaling agents (e.g., a modified IL-2) described herein.

[0293] In one embodiment, the present chimeric proteins or chimeric protein complexes such as Fc-based chimeric protein complexes have a targeting moiety directed against a dendritic cell, for example, mediated by targeting to CLEC-9A, DC-SIGN, CD64, CLEC4A, or DEC205, along with any of the signaling agents (e.g., a modified IL-2) described herein. In an embodiment, the present chimeric proteins or chimeric protein complexes such as Fc-based chimeric protein complexes have a targeting moiety directed against CLEC9A on dendritic cells and a second targeting moiety directed against PD-L1 or PD-L2 on tumor cells.

[0294] In one embodiment, the present chimeric proteins or chimeric protein complexes such as Fc-based chimeric protein complexes have a targeting moiety directed against a dendritic cell, for example, mediated by targeting to CLEC9A, along with any of the signaling agents (e.g., a modified IL-2) described herein. In an embodiment, the present chimeric proteins or chimeric protein complexes such as Fc-based chimeric protein complexes have a targeting moiety directed against CLEC9A on dendritic cells and a second targeting moiety directed against PD-L1 or PD-L2 on tumor cells.

[0295] In one embodiment, the present chimeric proteins or chimeric protein complexes such as Fc-based chimeric protein complexes have a targeting moiety directed against a dendritic cell, for example, mediated by targeting to XCR1, along with any of the signaling agents (e.g., a modified IL-2) described herein. In an embodiment, the present chimeric proteins or chimeric protein complexes such as Fc-based chimeric protein complexes have a targeting moiety directed against XCR1 on dendritic cells and a second targeting moiety directed against PD-L1 or PD-L2 on tumor cells.

[0296] In one embodiment, the present chimeric proteins or chimeric protein complexes such as Fc-based chimeric protein complexes have a targeting moiety directed against a dendritic cell, for example, mediated by targeting to RANK, along with any of the signaling agents (e.g., a modified IL-2) described herein. In an embodiment, the present chimeric proteins or chimeric protein complexes such as Fc-based chimeric protein complexes have a targeting moiety directed against RANK on dendritic cells and a second targeting moiety directed against PD-L1 or PD-L2 on tumor cells.

[0297] By way of non-limiting example, in various embodiments, the present chimeric proteins or chimeric protein complexes such as Fc-based chimeric protein complexes have a targeting moiety directed against a monocyte/macrophage, for example, mediated by targeting to SIRP1a, B7-1/CD80, ILT4/CD85d, B7-H1, ILT5/CD85a, Common β Chain, Integrin α 4/CD49d, BLAME/SLAMF8, Integrin α X/CDIIc, CCL6/C10, Integrin β 2/CD18, CD155/PVR, Integrin β 3/CD61, CD31/PECAM-1, Latexin, CD36/SR-B3, Leukotriene B4 R1, CD40/TNFRSF5, LIMPIIISR-B2, CD43, LMIR1/CD300A, CD45, LMIR2/CD300c, CD68, LMIR3/CD300LF, CD84/SLAMF5, LMIR5/CD300LB, CD97, LMIR6/CD300LE, CD163, LRP-1, CD2F-10/SLAMF9, MARCO, CRACC/SLAMF7, MD-1, ECF-L, MD-2, EMMPRIN/CD147, MGL2, Endoglin/CD105, Osteoactivin/GPNMB, Fc-γ RI/CD64, Osteopontin, Fc-γ RIIB/CD32b, PD-L2, Fc-γ RIIC/CD32c, Siglec-3/CD33, Fc-γ RIIA/CD32a, SIGNR1/CD209, Fc-γ RIII/CD16, SLAM, GM-CSF R α, TCCR/WSX-1, ICAM-2/CD102, TLR3, IFN-γ RI, TLR4, IFN-Y R2, TREM-I, IL-I RII, TREM-2, ILT2/CD85j, TREM-3, ILT3/CD85k, TREML1/TLT-1, 2B4/SLAMF 4, IL-10 R α, ALCAM, IL-10 R β, AminopeptidaseN/ANPEP, ILT2/CD85j, Common β Chain, ILT3/CD85k, Clq R1/CD93, ILT4/CD85d, CCR1, ILT5/CD85a, CCR2, CD206, Integrin α 4/CD49d, CCR5, Integrin α M/CDII b, CCR8, Integrin α X/CDIIc, CD155/PVR, Integrin β 2/CD18, CD14, Integrin β 3/CD61, CD36/SR-B3, LAIR1, CD43, LAIR2, CD45, Leukotriene B4-R1, CD68, LIMPIIISR-B2, CD84/SLAMF5, LMIR1/CD300A, CD97, LMIR2/CD300c, CD163, LMIR3/CD300LF, Coagulation Factor III/Tissue Factor, LMIR5/CD300LB, CX3CR1, CX3CL1, LMIR6/CD300LE, CXCR4, LRP-1, CXCR6, M-CSF R, DEP-1/CD148, MD-1, DNAM-1, MD-2, EMMPRIN/CD147, MMR, Endoglin/CD105, NCAM-L1, Fc-γ RI/CD64, PSGL-1, Fc-γ RIIIICD16, RP105, G-CSF R, L-Selectin, GM-CSF R α, Siglec-3/CD33, HVEM/TNFRSF14, SLAM, ICAM-1/CD54, TCCR/WSX-1, ICAM-2/CD102, TREM-I, IL-6 R, TREM-2, CXCRI/IL-8 RA, TREM-3, or TREMLI/TLT-1; along with any of the signaling agents (e.g., a modified IL-2) described herein.

[0298] In one embodiment, the present chimeric proteins or chimeric protein complexes such as Fc-based chimeric protein complexes have a targeting moiety directed against a monocyte/macrophage, for example, mediated by targeting to B7-H1, CD31/PECAM-1, CD163, CCR2, or Macrophage Mannose Receptor CD206, along with any of the signaling agents (e.g., a modified IL-2) described herein.

[0299] In one embodiment, the present chimeric proteins or chimeric protein complexes such as Fc-based chimeric protein complex has a targeting moiety directed against a monocyte/macrophage, for example, mediated by targeting to SIRP1a, along with any of the signaling agents (e.g., a modified IL-2) described herein. In an embodiment, the present chimeric proteins or chimeric protein complexes such as Fc-based chimeric protein complex has a targeting moiety directed against SIRP1a on macrophage cells and a second targeting moiety directed against PD-L1 or PD-L2 on tumor cells.

[0300] In various embodiments, the present chimeric proteins or chimeric protein complexes such as Fc-based chimeric protein complex has one or more targeting moieties directed against a checkpoint marker, e.g. one or more of PD-1/PD-L1 or PD-L2, CD28/CD80 or CD86, CTLA4/CD80 or CD86, ICOS/ICOSL or B7RP1, BTLA/HVEM, KIR, LAG3, CD137/CD137L, OX40/OX40L, CD27, CD40L, TIM3/Gal9, CD47, CD70, and A2aR, along with any of the signaling agents (e.g., a modified IL-2) described herein.

[0301] In some embodiments, the present chimeric proteins or chimeric protein complexes such as Fc-based chimeric protein complex comprises one or more targeting moieties directed to the same or different immune cells. In some embodiments, the present chimeric proteins or chimeric protein complexes such as Fc-based chimeric protein complex has one or more targeting moieties directed against an immune cell selected from a T cell, a B cell, a dendritic cell, a macrophage, a NK cell, or subsets thereof, along with any of the signaling agents (e.g., a modified IL-2) described herein.

[0302] In one embodiment, the present chimeric proteins or chimeric protein complexes such as Fc-based chimeric protein complex comprises a targeting moiety directed against a tumor cell. In such embodiments, the targeting moiety may bind to any of the tumor antigens described herein.

[0303] In some embodiments, the chimeric proteins or chimeric protein complexes, such as Fc-based chimeric protein complexes, of the invention comprise one or more targeting moieties having recognition domains that bind to a target (e.g. antigen, receptor) of interest including those found on one or more cells selected from adipocytes (e.g., white fat cell, brown fat cell), liver lipocytes, hepatic cells, kidney cells (e.g., kidney parietal cell, kidney salivary gland, mammary gland, etc.), duct cells (of seminal vesicle, prostate gland, etc.), intestinal brush border cells (with microvilli), exocrine gland striated duct cells, gall bladder epithelial cells, ductulus efferens nonciliated cells, epididymal principal cells, epididymal basal cells, endothelial cells, ameloblast epithelial cells (tooth enamel secretion), planum semilunatum epithelial cells of vestibular system of ear (proteoglycan secretion), organ of Corti interdental epithelial cells (secreting tectorial membrane covering hair cells), loose connective tissue fibroblasts, corneal fibroblasts (corneal keratocytes), tendon fibroblasts, bone marrow reticular tissue fibroblasts, nonepithelial fibroblasts, pericytes, nucleus pulposus cells of intervertebral disc, cementoblasts/cementocytes (tooth root bonelike ewan cell secretion), odontoblasts/odontocytes (tooth dentin secretion), hyaline cartilage chondrocytes, fibrocartilage chondrocytes, elastic cartilage chondrocytes, osteoblasts/osteocytes, osteoprogenitor cells (stem cell of osteoblasts), hyalocytes of vitreous body of eye, stellate cells of perilymphatic space of ear, hepatic stellate cells (Ito cell), pancreatic stelle cells, skeletal muscle cells, satellite cells, heart muscle cells, smooth muscle cells, myoepithelial cells of iris, myoepithelial cells of exocrine glands, exocrine secretory epithelial cells (e.g., salivary gland cells, mammary gland cells, lacrimal gland cells, sweat gland cells, sebaceious gland cells, prostate gland cells, gastric glad cells, pancreatic acinar cells, pneumocytes), a hormone secreting cells (e.g., pituitary cells, neurosecretory cells, gut and respiratory tract cells, thyroid gland cells, parathyroid glad cells, adrenal gland cells, Leydig cells of testes, pancreatic islet cells), keratinizing epithelial cells, wet stratified barrier epithelial cells, neuronal cells (e.g., sensory transducer cells, autonomic neuron cells, sense organ and peripheral neuron supporting cells, and central nervous system neurons and glial cells such as interneurons, principal cells, astrocytes, oligodendrocytes, and ependymal cells).

### Targeting Moiety Formats

[0304] In various embodiments, the targeting moiety of the present chimeric proteins or chimeric protein complexes, such as Fc-based chimeric protein complexes, are protein-based agents capable of specific binding, such as an antibodies or derivatives thereof. In an embodiment, the targeting moiety comprises an antibody. In various embodiments, the antibody is a full-length multimeric protein that includes two heavy chains and two light chains. Each heavy chain includes one variable region (e.g., V_{H}) and at least three constant regions (e.g., CH₁, CH₂ and CH₃), and each light chain includes one variable region (V_{L}) and one constant region (C_{L}). The variable regions determine the specificity of the antibody. Each variable region comprises three hypervariable regions also known as complementarity determining regions (CDRs) flanked by four relatively conserved framework regions (FRs). The three CDRs, referred to as CDR1, CDR2, and CDR3, contribute to the antibody binding specificity. In some embodiments, the antibody is a chimeric antibody. In some embodiments, the antibody is a humanized antibody.

[0305] In some embodiments, the targeting moiety comprises antibody derivatives or formats. In some embodiments, the targeting moiety of the present chimeric proteins or chimeric protein complexes such as Fc-based chimeric protein complex is a single-domain antibody, a recombinant heavy-chain-only antibody (VHH), a single-chain antibody (scFv), a shark heavy-chain-only antibody (VNAR), a microprotein (cysteine knot protein, knottin), a DARPin; a Tetranectin; an Affibody; a Transbody; an Anticalin; an AdNectin; an Affilin; a Microbody; a peptide aptamer; an alterases; a plastic antibodies; a phylomer; a stradobodies; a maxibodies; an evibody; a fynomer, an armadillo repeat protein, a Kunitz domain, an avimer, an atrimer, a probody, an immunobody, a triomab, a troybody; a pepbody; a vaccibody, a UniBody; affimers, a DuoBody, a Fv, a Fab, a Fab′, a F(ab′)2, a peptide mimetic molecule, or a synthetic molecule, as described in US patent Nos. or Patent Publication Nos. U.S. Pat. No. 7,417,130, US 2004/132094, U.S. Pat. No. 5,831,012, US 2004/023334, U.S. Pat. Nos. 7,250,297, 6,818,418, US 2004/209243, U.S. Pat. Nos. 7,838,629, 7,186,524, 6,004,746, 5,475,096, US 2004/146938, US 2004/157209, U.S. Pat. Nos. 6,994,982, 6,794,144, US 2010/239633, U.S. Pat. No. 7,803,907, US 2010/119446, and/or U.S. Pat. No. 7,166,697, the contents of which are hereby incorporated by reference in their entireties. See also, Storz MAbs. 2011 May-June; 3(3): 310-317.

[0306] In one embodiment, the targeting moiety comprises a single-domain antibody, such as VHH from, for example, an organism that produces VHH antibody such as a camelid, a shark, or a designed VHH. VHHs are antibody-derived therapeutic proteins that contain the unique structural and functional properties of naturally-occurring heavy-chain antibodies. VHH technology is based on fully functional antibodies from camelids that lack light chains. These heavy-chain antibodies contain a single variable domain (VHH) and two constant domains (CH2 and CH3). VHHs are commercially available under the trademark of NANOBODY or NANOBODIES.

[0307] In an embodiment, the targeting moiety comprises a VHH. In some embodiments, the VHH is a humanized VHH or camelized VHH.

[0308] In some embodiments, the VHH comprises a fully human VH domain, e.g. a HUMABODY (Crescendo Biologics, Cambridge, UK). In some embodiments, fully human VH domain, e.g. a HUMABODY is monovalent, bivalent, or trivalent. In some embodiments, the fully human VH domain, e.g. a HUMABODY is mono- or multi-specific such as monospecific, bispecific, or trispecific. Illustrative fully human VH domains, e.g. a HUMABODIES are described in, for example, WO 2016/113555 and WO2016/113557, the entire disclosure of which is incorporated by reference.

[0309] In various embodiments, the targeting moiety of the present chimeric proteins or chimeric protein complexes such as Fc-based chimeric protein complex is a protein-based agent capable of specific binding to a cell receptor, such as a natural ligand for the cell receptor. In various embodiments, the cell receptor is found on one or more immune cells, which can include, without limitation, T cells, cytotoxic T lymphocytes, T helper cells, natural killer (NK) cells, natural killer T (NKT) cells, anti-tumor macrophages (e.g. M1 macrophages), B cells, dendritic cells, or subsets thereof. In some embodiments, the cell receptor is found on megakaryocytes, thrombocytes, erythrocytes, mast cells, basophils, neutrophils, eosinophils, or subsets thereof.

[0310] In some embodiments, the targeting moiety is a natural ligand such as a chemokine. Illustrative chemokines that may be included in the chimeric proteins or chimeric protein complexes such as Fc-based chimeric protein complex of the invention include, but are not limited to, CCL1, CCL2, CCL4, CCL5, CCL6, CCL7, CCL8, CCL9, CCL10, CCL11, CCL12, CCL13, CCL14, CCL15, CCL16, CL17, CCL18, CCL19, CCL20, CCL21, CCL22, CCL23, CCL24, CLL25, CCL26, CCL27, CXCL1, CXCL2, CXCL3, CXCL4, CXCL5, CXCL6, CXCL7, CXCL8, CXCL9, CXCL10, CXCL11, CXCL12, CXCL13, CXCL14, CXCL15, CXCL16, CXCL17, XCL1, XCL2, CX3CL1, HCC-4, and LDGF-PBP. In an illustrative embodiment, the targeting moiety may be XCL1 which is a chemokine that recognizes and binds to the dendritic cell receptor XCR1. In another illustrative embodiment, the targeting moiety is CCL1, which is a chemokine that recognizes and binds to CCR8. In another illustrative embodiment, the targeting moiety is CCL2, which is a chemokine that recognizes and binds to CCR2 or CCR9. In another illustrative embodiment, the targeting moiety is CCL3, which is a chemokine that recognizes and binds to CCR1, CCR5, or CCR9. In another illustrative embodiment, the targeting moiety is CCL4, which is a chemokine that recognizes and binds to CCR1 or CCR5 or CCR9. In another illustrative embodiment, the targeting moiety is CCL5, which is a chemokine that recognizes and binds to CCR1 or CCR3 or CCR4 or CCR5. In another illustrative embodiment, the targeting moiety is CCL6, which is a chemokine that recognizes and binds to CCR1. In another illustrative embodiment, the targeting moiety is CCL7, which is a chemokine that recognizes and binds to CCR2 or CCR9. In another illustrative embodiment, the targeting moiety is CCL8, which is a chemokine that recognizes and binds to CCR1 or CCR2 or CCR2B or CCR5 or CCR9. In another illustrative embodiment, the targeting moiety is CCL9, which is a chemokine that recognizes and binds to CCR1. In another illustrative embodiment, the targeting moiety is CCL10, which is a chemokine that recognizes and binds to CCR1. In another illustrative embodiment, the targeting moiety is CCL11, which is a chemokine that recognizes and binds to CCR2 or CCR3 or CCR5 or CCR9. In another illustrative embodiment, the targeting moiety is CCL13, which is a chemokine that recognizes and binds to CCR2 or CCR3 or CCR5 or CCR9. In another illustrative embodiment, the targeting moiety is CCL14, which is a chemokine that recognizes and binds to CCR1 or CCR9. In another illustrative embodiment, the targeting moiety is CCL15, which is a chemokine that recognizes and binds to CCR1 or CCR3. In another illustrative embodiment, the targeting moiety is CCL16, which is a chemokine that recognizes and binds to CCR1, CCR2, CCR5, or CCR8. In another illustrative embodiment, the targeting moiety is CCL17, which is a chemokine that recognizes and binds to CCR4. In another illustrative embodiment, the targeting moiety is CCL19, which is a chemokine that recognizes and binds to CCR7. In another illustrative embodiment, the targeting moiety is CCL20, which is a chemokine that recognizes and binds to CCR6. In another illustrative embodiment, the targeting moiety is CCL21, which is a chemokine that recognizes and binds to CCR7. In another illustrative embodiment, the targeting moiety is CCL22, which is a chemokine that recognizes and binds to CCR4. In another illustrative embodiment, the targeting moiety is CCL23, 25 which is a chemokine that recognizes and binds to CCR1. In another illustrative embodiment, the targeting moiety is CCL24, which is a chemokine that recognizes and binds to CCR3. In another illustrative embodiment, the targeting moiety is CCL25, which is a chemokine that recognizes and binds to CCR9. In another illustrative embodiment, the targeting moiety is CCL26, which is a chemokine that recognizes and binds to CCR3. In another illustrative embodiment, the targeting moiety is CCL27, which is a chemokine that recognizes and binds to CCR10. In another illustrative embodiment, the targeting moiety is CCL28, which is a chemokine that recognizes and binds to CCR3 or CCR10. In another illustrative embodiment, the targeting moiety is CXCL1, which is a chemokine that recognizes and binds to CXCR1 or CXCR2. In another illustrative embodiment, the targeting moiety is CXCL2, which is a chemokine that recognizes and binds to CXCR2. In another illustrative embodiment, the targeting moiety is CXCL3, which is a chemokine that recognizes and binds to CXCR2. In another illustrative embodiment, the targeting moiety is CXCL4, which is a chemokine that recognizes and binds to CXCR3B. In another illustrative embodiment, the targeting moiety is CXCL5, which is a chemokine that recognizes and binds to CXCR2. In another illustrative embodiment, the targeting moiety is CXCL6, which is a chemokine that recognizes and binds to CXCR1 or CXCR2. In another illustrative embodiment, the targeting moiety is CXCL8, which is a chemokine that recognizes and binds to CXCR1 or CXCR2. In another illustrative embodiment, the targeting moiety is CXCL9, which is a chemokine that recognizes and binds to CXCR3. In another illustrative embodiment, the targeting moiety is CXCL10, which is a chemokine that recognizes and binds to CXCR3. In another illustrative embodiment, the targeting moiety is CXCL11, which is a chemokine that recognizes and binds to CXCR3 or CXCR7. In another illustrative embodiment, the targeting moiety is CXCL 12, which is a chemokine that recognizes and binds to CXCR4 or CXCR7. In another illustrative embodiment, the targeting moiety is CXCL13, which is a chemokine that recognizes and binds to CXCR5. In another illustrative embodiment, the targeting moiety is CXCL16, which is a chemokine that recognizes and binds to CXCR6. In another illustrative embodiment, the targeting moiety is LDGF-PBP, which is a chemokine that recognizes and binds to CXCR2. In another illustrative embodiment, the targeting moiety is XCL2, which is a chemokine that recognizes and binds to XCR1. In another illustrative embodiment, the targeting moiety is CX3CL1, which is a chemokine that recognizes and binds to CX3CR1.

[0311] In some embodiments, the targeting moiety is a natural ligand such as FMS-like tyrosine kinase 3 ligand (FIt3L) or a truncated region thereof (e.g., which is able to bind Flt3). In some embodiments, the targeting moiety is an extracellular domain of Flt3L. In some embodiments, the targeting moiety comprising a FIt3L domain, wherein the Flt3L domain is a single chain dimer, optionally where one FIt3L domain is connected to the other FIt3L domain via one or more linkers, wherein the linker is a flexible linker. In some embodiments, the targeting moiety of the present invention comprises Flt3L domain, wherein the FIt3L domain is a single chain dimer and a Fc domain, the Fc domain optionally having one or more mutations that reduces or eliminates one or more effector functions of the Fc domain, promotes Fc chain pairing in the Fc domain, and/or stabilizes a hinge region in the Fc domain. In some embodiments, the targeting moiety recognizes CD20. In some embodiments, the targeting moiety recognizes PD-L1. In some embodiments, the targeting moiety recognizes Clec9A.

[0312] In various embodiments, the present chimeric proteins or chimeric protein complexes such as Fc-based chimeric protein complex comprises targeting moieties in various combinations. In an illustrative embodiment, the present chimeric proteins or chimeric protein complexes such as Fc-based chimeric protein complex may comprise two targeting moieties, wherein both targeting moieties are antibodies or derivatives thereof. In another illustrative embodiment, the present chimeric proteins or chimeric protein complexes such as Fc-based chimeric protein complex may comprise two targeting moieties, wherein both targeting moieties are natural ligands for cell receptors. In a further illustrative embodiment, the present chimeric proteins or chimeric protein complexes such as Fc-based chimeric protein complex may comprise two targeting moieties, wherein one of the targeting moieties is an antibody or derivative thereof, and the other targeting moiety is a natural ligand for a cell receptor. In various embodiments, the recognition domain of the present chimeric proteins or chimeric protein complexes such as Fc-based chimeric protein complex functionally modulates (by way of non-limitation, partially or completely neutralizes) the target (e.g. antigen, receptor) of interest, e.g. substantially inhibiting, reducing, or neutralizing a biological effect that the antigen has. For example, various recognition domains may be directed against one or more tumor antigens that are actively suppressing, or have the capacity to suppress, the immune system of, for example, a patient bearing a tumor. For example, in some embodiments, the present chimeric proteins or chimeric protein complexes such as Fc-based chimeric protein complex functionally modulates immune inhibitory signals (e.g. checkpoint inhibitors), for example, one or more of TIM-3, BTLA, PD-1, CTLA-4, B7-H4, GITR, galectin-9, HVEM, PD-L1, PD-L2, B7-H3, CD244, CD160, TIGIT, SIRPα, ICOS, CD172a, and TMIGD2. For example, in some embodiments, the present chimeric proteins or chimeric protein complexes such as Fc-based chimeric protein complex is engineered to disrupt, block, reduce, and/or inhibit the transmission of an immune inhibitory signal, by way of non-limiting example, the binding of PD-1 with PD-L1 or PD-L2 and/or the binding of CTLA-4 with one or more of AP2M1, CD80, CD86, SHP-2, and PPP2R5A.

[0313] In various embodiments, the recognition domain of the present chimeric proteins or chimeric protein complexes such as Fc-based chimeric protein complex binds but does not functionally modulate the target (e.g. antigen, receptor) of interest, e.g. the recognition domain is, or is akin to, a binding antibody. For instance, in various embodiments, the recognition domain simply targets the antigen or receptor but does not substantially inhibit, reduce or functionally modulate a biological effect that the antigen or receptor has. For example, some of the smaller antibody formats described above (e.g. as compared to, for example, full antibodies) have the ability to target hard to access epitopes and provide a larger spectrum of specific binding locales. In various embodiments, the recognition domain binds an epitope that is physically separate from an antigen or receptor site that is important for its biological activity (e.g. the antigen's active site).

[0314] Such non-neutralizing binding finds use in various embodiments of the present invention, including methods in which the present chimeric proteins or chimeric protein complexes such as Fc-based chimeric protein complex is used to directly or indirectly recruit active immune cells to a site of need via an effector antigen, such as any of those described herein. For example, in various embodiments, the present chimeric proteins or chimeric protein complexes such as Fc-based chimeric protein complex may be used to directly or indirectly recruit cytotoxic T cells via CD8 to a tumor cell in a method of reducing or eliminating a tumor (e.g. the chimeric proteins or chimeric protein complexes such as Fc-based chimeric protein complex may comprise an anti-CD8 recognition domain and a recognition domain directed against a tumor antigen). In such embodiments, it is desirable to directly or indirectly recruit CD8-expressing cytotoxic T cells but not to functionally modulate the CD8 activity. On the contrary, in these embodiments, CD8 signaling is an important piece of the tumor reducing or eliminating effect. By way of further example, in various methods of reducing or eliminating tumors, the present chimeric proteins or chimeric protein complexes such as Fc-based chimeric protein complex is used to directly or indirectly recruit dendritic cells (DCs) via CLEC9A (e.g. the chimeric proteins or chimeric protein complexes such as Fc-based chimeric protein complex may comprise an anti-CLEC9A recognition domain and a recognition domain directed against a tumor antigen). In such embodiments, it is desirable to directly or indirectly recruit CLEC9A-expressing DCs but not to functionally modulate the CLEC9A activity. On the contrary, in these embodiments, CLEC9A signaling is an important piece of the tumor reducing or eliminating effect.

[0315] In various embodiments, the recognition domain of the present chimeric proteins or chimeric protein complexes such as Fc-based chimeric protein complex binds to XCR1 e.g. on dendritic cells. For instance, the recognition domain, in some embodiments comprises all or part of XCL1 or a non-neutralizing anti-XCR1 agent.

[0316] In various embodiments, the recognition domain of the present chimeric proteins or chimeric protein complexes such as Fc-based chimeric protein complex binds to an immune modulatory antigen (e.g. immune stimulatory or immune inhibitory). In various embodiments, the immune modulatory antigen is one or more of 4-1BB, OX-40, HVEM, GITR, CD27, CD28, CD30, CD40, ICOS ligand; OX-40 ligand, LIGHT (CD258), GITR ligand, CD70, B7-1, B7-2, CD30 ligand, CD40 ligand, ICOS, ICOS ligand, CD137 ligand and TL1A. In various embodiments, such immune stimulatory antigens are expressed on a tumor cell. In various embodiments, the recognition domain of the present chimeric proteins or chimeric protein complexes such as Fc-based chimeric protein complex binds but does not functionally modulate such immune stimulatory antigens and therefore allows recruitment of cells expressing these antigens without the reduction or loss of their potential tumor reducing or eliminating capacity.

[0317] In various embodiments, the recognition domain of the present chimeric proteins or chimeric protein complexes such as Fc-based chimeric protein complex may be in the context of chimeric proteins or chimeric protein complexes such as Fc-based chimeric protein complex that comprises two recognition domains that have neutralizing activity, or comprises two recognition domains that have non-neutralizing (e.g. binding) activity, or comprises one recognition domain that has neutralizing activity and one recognition domain that has non-neutralizing (e.g. binding) activity.

### Fc Domains

[0318] The fragment crystallizable domain (Fc domain) is the tail region of an antibody that interacts with Fc receptors located on the cell surface of cells that are involved in the immune system, e.g., B lymphocytes, dendritic cells, natural killer cells, macrophages, neutrophils, eosinophils, basophils, and mast cells. In IgG, IgA and IgD antibody isotypes, the Fc domain is composed of two identical protein fragments, derived from the second and third constant domains of the antibody's two heavy chains. In IgM and IgE antibody isotypes, the Fc domain contains three heavy chain constant domains (CH domains 2-4) in each polypeptide chain.

[0319] In some embodiments, the Fc-based chimeric protein of complex the present technology includes a Fc domain. In some embodiments, the Fc domains are from selected from IgG, IgA, IgD, IgM or IgE. In some embodiments, the Fc domains are from selected from IgG1, IgG2, IgG3, or IgG4.

[0320] In some embodiments, the Fc domains are from selected from human IgG, IgA, IgD, IgM or IgE. In some embodiments, the Fc domains are from selected from human IgG1, IgG2, IgG3, or IgG4.

[0321] In some embodiments, the Fc domains of the Fc-based chimeric protein complex comprise the CH₂ and CH₃ regions of IgG. In some embodiments, the IgG is human IgG. In some embodiments, the human IgG is selected from IgG1, IgG2, IgG3, or IgG4.

[0322] In some embodiments, the Fc domains comprise one or more mutations. In some embodiments, the mutation(s) to the Fc domains reduces or eliminates the effector function the Fc domains. In some embodiments, the mutated Fc domain has reduced affinity or binding to a target receptor. By way of example, in some embodiments, the mutation to the Fc domains reduces or eliminates the binding of the Fc domains to FcγR. In some embodiments, the FcγR is selected from FcγRI; FcγRIIa, 131 R/R; FcγRIIa, 131 H/H, FcγRIIb; and FcγRIII. In some embodiments, the mutation to the Fc domains reduces or eliminated binding to complement proteins, such as, e.g., Clq. In some embodiments, the mutation to the Fc domains reduces or eliminated binding to both FcγR and complement proteins, such as, e.g., Clq.

[0323] In some embodiments, the Fc domains comprise the LALA mutation to reduce or eliminate the effector function of the Fc domains. By way of example, in some embodiments, the LALA mutation comprises L234A and L235A substitutions in human IgG (e.g., IgG1) (wherein the numbering is based on the commonly used numbering of the CH₂ residues for human IgG1 according to EU convention (PNAS, Edelman et al., 1969; 63 (1) 78-85).

[0324] In some embodiments, the Fc domains of human IgG comprise a mutation at 46. to reduce or eliminate the effector function of the Fc domains. By way of example, in some embodiments, the mutations are selected from L234A, L234F, L235A, L235E, L235Q, K322A, K322Q, D265A, P329G, P329A, P331G, and P331S.

[0325] In some embodiments, the Fc domains comprise the FALA mutation to reduce or eliminate the effector function of the Fc domains. By way of example, in some embodiments, the FALA mutation comprises F234A and L235A substitutions in human IgG4.

[0326] In some embodiments, the Fc domains of human IgG4 comprise a mutation at one or more of F234, L235, K322, D265, and P329 to reduce or eliminate the effector function of the Fc domains. By way of example, in some embodiments, the mutations are selected from F234A, L235A, L235E, L235Q, K322A, K322Q, D265A, P329G, and P329A.

[0327] In some embodiments, the mutation(s) to the Fc domain stabilize a hinge region in the Fc domain. By way of example, in some embodiments, the Fc domain comprises a mutation at S228 of human IgG to stabilize a hinge region. In some embodiments, the mutation is S228P.

[0328] In some embodiments, the mutation(s) to the Fc domain promote chain pairing in the Fc domain. In some embodiments, chain pairing is promoted by ionic pairing (a/k/a charged pairs, ionic bond, or charged residue pair).

[0329] In some embodiments, the Fc domain comprises a mutation at one more of the following amino acid residues of IgG to promote of ionic pairing: D356, E357, L368, K370, K392, D399, and K409.

[0330] By way of example, in some embodiments, the human IgG Fc domain comprise one of the mutation combinations in Table 1 to promote of ionic pairing.

TABLE 1

| Substitution(s) on | Substitution(s) on |
|---|---|
| one Fc Chain | other Fc Chain |
| D356K D399K | K392D K409D |
| E357R L368R | K370D K409D |
| E357R L368K | K370D K409D |
| E357R D399K | K370D K409D |
| E357R | K370D |
| L368R D399K | K392D K409D |
| L368K D399K | K392D K409D |
| L368R D399K | K409D |
| L368K D399K | K409D |
| L368R | K409D |
| L368K | K409D |
| K370D K409D | E357R D399K |
| K370D K409D | E357R L368R |
| K370D K409D | E357R L368K |
| K370D K409D | E357R D399K |
| K370D K409D | E357R L368R |
| K370D K409D | E357R L368K |
| K370D | E357R |
| K370D | E357R |
| K392D K409D | D356K D399K |
| K392D K409D | L368R D399K |
| K392D K409D | L368K D399K |
| K392D K409D | D399K |
| D399K | K392D K409D |
| D399K | K409D |
| K409D | L368R |
| K409D | L368K |
| K409D | L368R D399K |
| K409D | L368K D399K |
| K409D | L368R |
| K409D | L368K |
| K409D | L368R D399K |
| K409D | L368K D399K |
| K409D | D399K |

[0331] In some embodiments, chain pairing is promoted by knob-in-hole mutations. In some embodiments, the Fc domain comprises one or more mutations to allow for a knob-in-hole interaction in the Fc domain. In some embodiments, a first Fc chain is engineered to express the “knob” and a second Fc chain is engineered to express the complementary “hole.” By way of example, in some embodiments, human IgG Fc domain comprises the mutations of Table 2 to allow for a knob-in-hole interaction.

TABLE 2

| Substitution(s) on | Substitution(s) on |
|---|---|
| one Fc Chain | other Fc Chain |
| T366Y | Y407T |
| T366Y/F405A | T394W/Y407T |
| T366W | Y407A |
| T366W | Y407V |
| T366Y | Y407A |
| T366Y | Y407V |
| T366Y | Y407T |

[0332] In some embodiments, the Fc domains in the Fc-based chimeric protein complexes of the present technology comprise any combination of the above disclosed mutations. By way of example, in some embodiments, the Fc domain comprises mutations that promote ionic pairing and/or a knob-in-hole interaction. By way of example, in some embodiments, the Fc domain comprises mutations that have one or more of the following properties: promote ionic pairing, induce a knob-in-hole interaction, reduce or eliminate the effector function of the Fc domain, and cause Fc stabilization (e.g. at hinge).

[0333] By way of example, in some embodiments, a human IgG Fc domains comprise mutations disclosed in Table 3, which promote ionic pairing and/or promote a knob-in-hole interaction in the Fc domain.

TABLE 3

| Substitution(s) on | Substitution(s) on |
|---|---|
| one Fc Chain | other Fc Chain |
| T366W K370D | E357R Y407A |
| T366W K370D | E357R Y407V |
| T366W K409D | L368R Y407A |
| T366W K409D | L368R Y407V |
| T366W K409D | L368K Y407A |
| T366W K409D | L368K Y407V |
| T366W K409D | L368R D399K Y407A |
| T366W K409D | L368R D399K Y407V |
| T366W K409D | L368K D399K Y407A |
| T366W K409D | L368K D399K Y407V |
| T366W K409D | D399K Y407A |
| T366W K409D | D399K Y407V |
| T366W K392D K409D | D399K Y407A |
| T366W K392D K409D | D399K Y407V |
| T366W K392D K409D | D356K D399K Y407A |
| T366W K392D K409D | D356K D399K Y407V |
| T366W K370D K409D | E357R D399K Y407A |
| T366W K370D K409D | E357R D399K Y407V |
| T366W K370D K409D | E357R L368R Y407A |
| T366W K370D K409D | E357R L368R Y407V |
| T366W K370D K409D | E357R L368K Y407A |
| T366W K370D K409D | E357R L368K Y407V |
| T366W K392D K409D | L368R D399K Y407A |
| T366W K392D K409D | L368R D399K Y407V |
| T366W K392D K409D | L368K D399K Y407A |
| T366W K392D K409D | L368K D399K Y407V |
| E357R T366W | K370D Y407A |
| E357R T366W | K370D Y407V |
| T366W L368R | Y407A K409D |
| T366W L368R | Y407V K409D |
| T366W L368K | Y407A K409D |
| T366W L368K | Y407V K409D |
| T366W L368R D399K | Y407A K409D |
| T366W L368R D399K | Y407V K409D |
| T366W L368K D399K | Y407A K409D |
| T366W L368K D399K | Y407V K409D |
| T366W D399K | Y407A K409D |
| T366W D399K | Y407V K409D |
| 1366W D399K | K392D Y407A K409D |
| T366W D399K | K392D Y407V K409D |
| T366W D356K D399K | K392D Y407A K409D |
| T366W D356K D399K | K392D Y407V K409D |
| E357R T366W D399K | K370D Y407A K409D |
| E357R T366W D399K | K370D Y407V K409D |
| E357R T366W L368R | K370D Y407A K409D |
| E357R T366W L368R | K370D Y407V K409D |
| E357R T366W L368K | K370D Y407A K409D |
| E357R T366W L368K | K370D Y407V K409D |
| T366W L368R D399K | K392D Y407A K409D |
| T366W L368R D399K | K392D Y407V K409D |
| T366W L368K D399K | K392D Y407A K409D |

[0334] By way of example, in some embodiments, a human IgG Fc domains comprise mutations disclosed in Table 4, which promote ionic pairing, promote a knob-in-hole interaction, or a combination thereof in the Fc domain. In embodiments, the “Chain 1” and “Chain 2” of Table 4 can be interchanged (e.g. Chain 1 can have Y407T and Chain 2 can have T366Y).

TABLE 4

| Chain 1 mutation | Chain 2 mutation | Reference | IgG |
|---|---|---|---|
| T366Y | Y407T | Ridgway et al., 1996 Protein | IgG1 |
| | | Engineering, Design and Selection, | |
| | | Volume 9, Issue 7, 1 Jul. 1996, Pages | |
| | | 617-62 | |
| T366Y/F405A | T394W/Y407T | Ridgway et al., 1996 Protein | IgG1 |
| | | Engineering, Design and Selection, | |
| | | Volume 9, Issue 7, 1 Jul. 1996, Pages | |
| | | 617-62 | |
| T366W | Y407A | Atwell et al., 1997 JMB | IgG1 |
| | | Volume 270, Issue 1, 4 Jul. 1997, | |
| | | Pages 26-35 | |
| T366W | T366S/L368V/Y407A | Atwell et al., 1997 JMB | IgG1 |
| | | Volume 270, Issue 1, 4 Jul. 1997, | |
| | | Pages 26-35 | |
| T366W | L368A/Y407A | Atwell et al., 1997 JMB | IgG1 |
| | | Volume 270, Issue 1, 4 Jul. 1997, | |
| | | Pages 26-35 | |
| T366W | T366S/L368A/Y407A | Atwell et al., 1997 JMB | IgG1 |
| | | Volume 270, Issue 1, 4 Jul. 1997, | |
| | | Pages 26-35 | |
| T366W | T366S/L368G/Y407V | Atwell et al., 1997 JMB | IgG1 |
| | | Volume 270, Issue 1, 4 Jul. 1997, | |
| | | Pages 26-35 | |
| T366W/D399C | T366S/L368A/K392C/Y407V | Merchant et al., 1998 Nature | IgG1 |
| | | Biotechnology volume 16, pages 677- | |
| | | 681 (1998) | |
| T366W/K392C | T366S/L368A/D399C/Y407V | Merchant et al., 1998 Nature | IgG1 |
| | | Biotechnology volume 16, pages 677- | |
| | | 681 (1998) | |
| S354C/T366W | Y349C/T366S/L368A/Y407V | Merchant et al., 1998 Nature | IgG1 |
| | | Biotechnology volume 16, pages 677- | |
| | | 681 (1998) | |
| Y349C/T366W | S354C/T366S/L368A/Y407V | Merchant et al., 1998 Nature | IgG1 |
| | | Biotechnology volume 16, pages 677- | |
| | | 681 (1998) | |
| E356C/T366W | Y349C/T366S/L368A/Y407V | Merchant et al., 1998 Nature | IgG1 |
| | | Biotechnology volume 16, pages 677- | |
| | | 681 (1998) | |
| Y349C/T366W | E356C/T366S/L368A/Y407V | Merchant et al., 1998 Nature | IgG1 |
| | | Biotechnology volume 16, pages 677- | |
| | | 681 (1998) | |
| E357C/T366W | Y349C/T366S/L368A/Y407V | Merchant et al., 1998 Nature | IgG1 |
| | | Biotechnology volume 16, pages 677- | |
| | | 681 (1998) | |
| Y349C/T366W | E357C/T366S/L368A/Y407V | Merchant et al., 1998 Nature | IgG1 |
| | | Biotechnology volume 16, pages 677- | |
| | | 681 (1998) | |
| D339R | K409E | Gunasekaran et al., 2010 The Journal of | IgG1 |
| | | Biological Chemistry 285, 19637-19646. | |
| D339K | K409E | Gunasekaran et al., 2010 The Journal of | IgG1 |
| | | Biological Chemistry 285, 19637-19646. | |
| D339R | K409D | Gunasekaran et al., 2010 The Journal of | IgG1 |
| | | Biological Chemistry 285, 19637-19646. | |
| D339K | K409D | Gunasekaran et al., 2010 The Journal of | IgG1 |
| | | Biological Chemistry 285, 19637-19646. | |
| D339K | K360D/K409E | Gunasekaran et al., 2010 The Journal of | IgG1 |
| | | Biological Chemistry 285, 19637-19646. | |
| D339K | K392D/K409E | Gunasekaran et al., 2010 The Journal of | IgG1 |
| | | Biological Chemistry 285, 19637-19646. | |
| D339K/E356K | K392D/K409E | Gunasekaran et al., 2010 The Journal of | IgG1 |
| | | Biological Chemistry 285, 19637-19646. | |
| D339K/E357K | K392D/K409E | Gunasekaran et al., 2010 The Journal of | IgG1 |
| | | Biological Chemistry 285, 19637-19646. | |
| D339K/E356K | K409E/K439D | Gunasekaran et al., 2010 The Journal of | IgG1 |
| | | Biological Chemistry 285, 19637-19646. | |
| D339K/E357K | K370D/K409E | Gunasekaran et al., 2010 The Journal of | IgG1 |
| | | Biological Chemistry 285, 19637-19646. | |
| D339K/E356K/E357K | K370D/K392D/K409E | Gunasekaran et al., 2010 The Journal of | IgG1 |
| | | Biological Chemistry 285, 19637-19646. | |
| S364H/F405A | Y349T/T394F | Moore et al., 2011 mAbs, 3:6, 546-557 | IgG1 |
| S364H/T394F | Y349T/F405A | Moore et al., 2011 mAbs, 3:6, 546-557 | IgG1 |
| D221R/P228R/K409R | D221E/P228E/L368E | Strop et al., 2012 JMB Volume 420, | IgG1 |
| | | Issue 3, 13 Jul. 2012, Pages 204-219 | |
| C223R/E225R/P228R/K409R | C223E/P228E/L368E | Strop et al., 2012 JMB Volume 420, | IgG2 |
| | | Issue 3, 13 Jul. 2012, Pages 204-219 | |
| F405L | K409R | Labrijn et al., 2013 PNAS Mar. 26, | IgG1 |
| | | 2013. 110 (13) 5145-5150 | |
| F405A/Y407V | T394W | Von Kreudenstein et al., 2013 mAbs | IgG1 |
| | | Volume 5, 2013 - Issue 5, pp.644-654 | |
| F405A/Y407V | T366l/T394W | Von Kreudenstein et al., 2013 mAbs | IgG1 |
| | | Volume 5, 2013 - Issue 5, pp.644-654 | |
| F405A/Y407V | T366L/T394W | Von Kreudenstein et al., 2013 mAbs | IgG1 |
| | | Volume 5, 2013 - Issue 5, pp.644-654 | |
| F405A/Y407V | T366L/K392M/T394W | Von Kreudenstein et al., 2013 mAbs | IgG1 |
| | | Volume 5, 2013 - Issue 5, pp.644-654 | |
| L351Y/F405A/Y407V | T366L/K392M/T394W | Von Kreudenstein et al., 2013 mAbs | IgG1 |
| | | Volume 5, 2013 - Issue 5, pp.644-654 | |
| T350V/L351Y/F405A/Y407V | T350V/T366L/K392M/T394W | Von Kreudenstein et al., 2013 mAbs | IgG1 |
| | | Volume 5, 2013 - Issue 5, pp.644-654 | |
| T350V/L351Y/F405A/Y407V | T350V/T366L/K392L/T394W | Von Kreudenstein et al., 2013 mAbs | IgG1 |
| | | Volume 5, 2013 - Issue 5, pp.644-654 | |
| K409W | D339V/F405T | Choi et al., 2013 PNAS Jan. 2, | IgG1 |
| | | 2013. 110 (1) 270-275 | |
| K360E | Q347R | Choi et al., 2013 PNAS Jan. 2, | IgG1 |
| | | 2013. 110 (1) 270-275 | |
| K360E/K409W | D339V/Q347R/F405T | Choi et al., 2013 PNAS Jan. 2, | IgG1 |
| | | 2013. 110 (1) 270-275 | |
| Y349C/K360E/K409W | D339V/Q347R/S354C/F405T | Choi et al., 2013 PNAS Jan. 2, | IgG1 |
| | | 2013. 110 (1) 270-275 | |
| K392A/K409D | E356K/D399K | Leaver-Fey et al., 2016 Structure | IgG1 |
| | | Volume 24, Issue 4, 5 Apr. 2016, Pages | |
| | | 641-651 | |
| T366W | T366S/L358A/Y407A | Leaver-Fey et al., 2016 Structure | IgG1 |
| | | Volume 24, Issue 4, 5 Apr. 2016, Pages | |
| | | 641-651 | |
| D339M/Y407A | T336V/K409V | Leaver-Fey et al., 2016 Structure | IgG1 |
| | | Volume 24, Issue 4, 5 Apr. 2016, Pages | |
| | | 641-651 | |
| D339M/K360D/Y407A | T336V/E345R/Q347R/K409V | Leaver-Fey et al., 2016 Structure | IgG1 |
| | | Volume 24, Issue 4, 5 Apr. 2016, Pages | |
| | | 641-651 | |
| Y349S/T366V/K370Y/K409V | E357D/S364Q/Y407A | Leaver-Fey et al., 2016 Structure | IgG1 |
| | | Volume 24, Issue 4, 5 Apr. 2016, Pages | |
| | | 641-651 | |
| Y349S/T366M/K370Y/K409V | E356G/E357D/S364Q/Y407A | Leaver-Fey et al., 2016 Structure | IgG1 |
| | | Volume 24, Issue 4, 5 Apr. 2016, Pages | |
| | | 641-651 | |
| Y349S/T366M/K370Y/K409V | E357D/S364R/Y407A | Leaver-Fey et al., 2016 Structure | IgG1 |
| | | Volume 24, Issue 4, 5 Apr. 2016, Pages | |
| | | 641-651 | |

And any combination as described in Tables 1-3 of US20150284475A1

[0335] By way of example, in some embodiments, a human IgG Fc domains comprise mutations disclosed in Table 5, which reduce or eliminate FcγR and/or complement binding in the Fc domain. In embodiments, the Table 5 mutations are in both chains.

TABLE 5

| Chain 1 mutation | Reference | IgG |
|---|---|---|
| L234A/L235A | Alegre et al., 1994 | IgG1 |
| | Transplantation 57: 1537- | |
| | 1543 | |
| F234A/L235A | Alegre et al., 1994 | IgG4 |
| | Transplantation 57: 1537- | |
| | 1543 | |
| L235E | Morgan et al., 1995 | IgG1 |
| | Immunology. 1995 October; | |
| | 86(2): 319-324. | |
| L235E | Morgan et al., 1995 | IgG4 |
| | Immunology. 1995 October; | |
| | 86(2): 319-324. | |
| L235A | Morgan et al., 1995 | IgG1 |
| | Immunology. 1995 October; | |
| | 86(2): 319-324. | |
| G237A | Morgan et al., 1995 | IgG1 |
| | Immunology. 1995 October; | |
| | 86(2): 319-324. | |
| N297H | Tao and Morrison, | IgG1 |
| | J. Immunol. 1989; 143: 2595- | |
| | 2601 | |
| N297Q | Tao and Morrison, | IgG1 |
| | J. Immunol. 1989; 143: 2595- | |
| | 2601 | |
| N297K | Tao and Morrison, | IgG3 |
| | J. Immunol. 1989; 143: 2595- | |
| | 2601 | |
| N297Q | Tao and Morrison, | IgG3 |
| | J. Immunol. 1989; 143: 2595- | |
| | 2601 | |
| D265A | Idusogie et al., 2000 J | IgG1 |
| | Immunol Apr. 15, 2000, 164 | |
| | (8) 4178-4184 | |
| D270A, V, K | Idusogie et al., 2000 J | IgG1 |
| | Immunol Apr. 15, 2000, 164 | |
| | (8) 4178-4184 | |
| K322A, L, M, D, E | Idusogie et al., 2000 J | IgG1 |
| | Immunol Apr. 15, 2000, 164 | |
| | (8) 4178-4184 | |
| P329A, X | Idusogie et al., 2000 J | IgG1 |
| | Immunol Apr. 15, 2000, 164 | |
| | (8) 4178-4184 | |
| P331A, S, G, X | Idusogie et al., 2000 J | IgG1 |
| | Immunol Apr. 15, 2000, 164 | |
| | (8) 4178-4184 | |
| D265A | Idusogie et al., 2000 J | IgG1 |
| | Immunol Apr. 15, 2000, 164 | |
| | (8) 4178-4184 | |
| L234A | Hezareh et al., 2001 J. Virol. | IgG1 |
| | December 2001 vol. 75 no. | |
| | 24 12161-12168 | |
| L234A/L235A | Hezareh et al., 2001 J. Virol. | IgG1 |
| | December 2001 vol. 75 no. | |
| | 24 12161-12168 | |
| L234F/L235E/P331S | Oganesyan et al., 2008 Acta | IgG1 |
| | Cryst. (2008). D64, 700-704 | |
| H268Q/V309L/A330S/P331S | An et al., 2009 mAbs | IgG1 |
| | Volume 1, 2009 - Issue 6, | |
| | pp. 572-579 | |
| G236R/L328R | Moore et al., 2011 mAbs | IgG1 |
| | Volume 3, 2011 - Issue 6, | |
| | pp. 546-557 | |
| N297G | Couch et al., 2013 Sci. | IgG1 |
| | Transl. Med., 5 (2013) | |
| | 183ra57, 1-12 | |
| N297G/D265A | Couch et al., 2013 Sci. | IgG1 |
| | Transl. Med., 5 (2013) | |
| | 183ra57, 1-12 | |
| V234A/G237A/P328S/H268A/V309L/A330S/P331S | Vafa et al., 2014 Methods | IgG2 |
| | Volume 65, Issue 1, 1 | |
| | Jan. 2014, Pages 114- | |
| | 126 | |
| L234A/L235A/P329G | Lo et al., 2016 The Journal | IgG1 |
| | of Biological Chemistry | |
| | 292, 3900-3908 | |
| N297D | Schlothauer et al., 2016 | IgG1 |
| | Protein Engineering, Design | |
| | and Selection, Volume 29, | |
| | Issue 10, 1 Oct. 2016, | |
| | Pages 457-466 | |
| S228P/L235E | Schlothauer et al., 2016 | IgG4 |
| | Protein Engineering, Design | |
| | and Selection, Volume 29, | |
| | Issue 10, 1 Oct. 2016, | |
| | Pages 457-466 | |
| S228P/L235E/P329G | Schlothauer et al., 2016 | IgG4 |
| | Protein Engineering, Design | |
| | and Selection, Volume 29, | |
| | Issue 10, 1 Oct. 2016, | |
| | Pages 457-466 | |
| L234F/L235A/K322Q | Borrok et al., 2017 J Pharm | IgG1 |
| | Sci April 2017 Volume 106, | |
| | Issue 4, Pages 1008-1017 | |
| L234F/L235Q/P331G | Borrok et al., 2017 J Pharm | IgG1 |
| | Sci April 2017 Volume 106, | |
| | Issue 4, Pages 1008-1017 | |
| L234F/L235Q/K322Q | Borrok et al., 2017 J Pharm | IgG1 |
| | Sci April 2017 Volume 106, | |
| | Issue 4, Pages 1008-1017 | |
| L234A/L235A/G237A/P328S/H268A/A330S/P331S | Tam et al., 2017 Open | IgG1 |
| | Access | |
| | Antibodies 2017, 6(3), 12; | |
| | doi: 10.3390/antib6030012 | |
| S228P/F234A/L235A | Tam et al., 2017 Open | IgG4 |
| | Access | |
| | Antibodies 2017, 6(3), 12; | |
| | doi: 10.3390/antib6030012 | |
| S228P/F234A/L235A/G237A/P238S | Tam et al., 2017 Open | IgG4 |
| | Access | |
| | Antibodies 2017, 6(3), 12; | |
| | doi: 10.3390/antib6030012 | |
| S228P/F234A/L235A/G236□/G237A/P238S | Tam et al., 2017 Open | IgG4 |
| | Antibodies 2017, 6(3), 12; | |
| | Access | |
| | doi: 10.3390/antib6030012 | |

[0336] In some embodiments, the Fc domains in the Fc-based chimeric protein complexes of the present technology are homodimeric, i.e., the Fc region in the chimeric protein complex comprises two identical protein fragments.

[0337] In some embodiments, the Fc domains in the Fc-based chimeric protein complexes of the present technology are heterodimeric, i.e., the Fc domain comprises two non-identical protein fragments.

[0338] In some embodiments, heterodimeric Fc domains are engineered using ionic pairing and/or knob-in-hole mutations described herein. In some embodiments, the heterodimeric Fc-based chimeric protein complexes have a trans orientation/configuration. In a trans orientation/configuration, the targeting moiety and signaling agent, e.g. IL-2, are, in embodiments, not found on the same polypeptide chain in the present Fc-based chimeric protein complexes.

[0339] In some embodiments, the Fc domains includes or starts with the core hinge region of wild-type human IgG1, which contains the sequence Cys-Pro-Pro-Cys (SEQ ID NO: 276). In some embodiments, the Fc domains also include the upper hinge, or parts thereof (e.g., DKTHTCPPC (SEQ ID NO: 451); see WO 2009053368), EPKSCDKTHTCPPC (SEQ ID NO: 452), or EPKSSDKTHTCPPC (SEQ ID NO: 453); see Lo et al., Protein Engineering vol. 11 no. 6 pp. 495-500, 1998).

### Fc-Based Chimeric Protein Complexes

[0340] The Fc-based chimeric protein complexes of the present technology comprise at least one Fc domain disclosed herein, at least one signaling agent (SA), e.g. IL-2, disclosed herein, and at least one targeting moiety TM disclosed herein.

[0341] It is understood that the present Fc-based chimeric protein complexes may encompass a complex of two fusion proteins, each comprising an Fc domain.

[0342] In some embodiments, the Fc-based chimeric protein complex is heterodimeric. In some embodiments, the heterodimeric Fc-based chimeric protein complex has a trans orientation/configuration. In some embodiments, the heterodimeric Fc-based chimeric protein complex has a cis orientation/configuration.

[0343] In some embodiments, heterodimeric Fc domains are engineered using ionic pairing and/or knob-in-hole mutations described herein. In some embodiments, the heterodimeric Fc-based chimeric protein complexes have a trans orientation.

[0344] In a trans orientation, the targeting moiety and signaling agent are, in embodiments, not found on the same polypeptide chain in the present Fc-based chimeric protein complexes. In a trans orientation, the targeting moiety and signaling agent are, in embodiments, found on separate polypeptide chains in the Fc-based chimeric protein complexes. In a cis orientation, the targeting moiety and signaling agent are, in embodiments, found on the same polypeptide chain in the Fc-based chimeric protein complexes.

[0345] In some embodiments, where more than one targeting moiety is present in the heterodimeric protein complexes described herein, one targeting moiety may be in trans orientation (relative to the signaling agent), whereas another targeting moiety may be in cis orientation (relative to the signaling agent). In some embodiments, the signaling agent and target moiety are on the same ends/sides (N-terminal or C-terminal ends) of an Fc domain. In some embodiments, the signaling agent and targeting moiety are on different sides/ends of a Fc domain (N-terminal and C-terminal ends).

[0346] In some embodiments, where more than one targeting moiety is present in the heterodimeric protein complexes described herein, the targeting moieties may be found on the same Fc chain or on two different Fc chains in the heterodimeric protein complex (in the latter case the targeting moieties would be in trans relative to each other, as they are on different Fc chains). In some embodiments, where more than one targeting moiety is present on the same Fc chain, the targeting moieties may be on the same or different sides/ends of a Fc chain (N-terminal or/and C-terminal ends).

[0347] In some embodiments, where more than one signaling agent is present in the heterodimeric protein complexes described herein, the signaling agents may be found on the same Fc chain or on two different Fc chains in the heterodimeric protein complex (in the latter case the signaling agents would be in trans relative to each other, as they are on different Fc chains). In some embodiments, where more than one signaling agent is present on the same Fc chain, the signaling agents may be on the same or different sides/ends of a Fc chain (N-terminal or/and C-terminal ends).

[0348] In some embodiments, where more than one signaling agent is present in the heterodimeric protein complexes described herein, one signaling agent may be in trans orientation (as relates to the targeting moiety), whereas another signaling agent may be in cis orientation (as relates to the targeting moiety).

[0349] In some embodiments, the heterodimeric Fc-based chimeric protein complex does not comprise the signaling agent, e.g. IL-2, and targeting moiety on a single polypeptide.

[0350] In some embodiments, the Fc-based chimeric protein has an improved in vivo half-life relative to a chimeric protein lacking an Fc or a chimeric protein which is not a heterodimeric complex. In some embodiments, the Fc-based chimeric protein has an improved solubility, stability and other pharmacological properties relative to a chimeric protein lacking an Fc or a chimeric protein which is not a heterodimeric complex.

[0351] Heterodimeric Fc-based chimeric protein complexes are composed of two different polypeptides. In embodiments described herein, the targeting domain is on a different polypeptide than the signaling agent, e.g. IL-2, and accordingly, proteins that contain only one targeting domain copy, and also only one signaling agent, e.g. IL-2, copy can be made (this provides a configuration in which potential interference with desired properties can be controlled). Further, in embodiments, one targeting domain (e.g. VHH) only can avoid cross-linking of the antigen on the cell surface (which could elicit undesired effects in some cases). Further, in embodiments, one signaling agent, e.g. IL-2, may alleviate molecular “crowding” and potential interference with avidity mediated induction or restoration of effector function in dependence of the targeting domain. Further, in embodiments, heterodimeric Fc-based chimeric protein complexes can have two targeting moieties and these can be placed on the two different polypeptides. For instance, in embodiments, the C-terminus of both targeting moieties (e.g. VHHs) can be masked to avoid potential autoantibodies or pre-existing antibodies (e.g. VHH autoantibodies or pre-existing antibodies). Further, in embodiments, heterodimeric Fc-based chimeric protein complexes, e.g. with the targeting domain on a different polypeptide than the signaling agent, e.g. IL-2 (e.g. wild type signaling agent, e.g. wild type IL-2), may favor “cross-linking” of two cell types (e.g. a tumor cell and an immune cell). Further, in embodiments, heterodimeric Fc-based chimeric protein complexes can have two signaling agent, each on different polypeptides to allow more complex effector responses.

[0352] Further, in embodiments, heterodimeric Fc-based chimeric protein complexes, e.g. with the targeting domain on a different polypeptide than the signaling agent, e.g. IL-2, combinatorial diversity of targeting moiety and signaling agent, e.g. IL-2, is provided in a practical manner. For instance, in embodiments, polypeptides with any of the targeting moieties described herein can be combined “off the shelf” with polypeptides with any of the signaling agents described herein to allow rapid generation of various combinations of targeting moieties and signaling agents in single Fc-based chimeric protein complexes.

[0353] In some embodiments, the Fc-based chimeric protein complex comprises one or more linkers. In some embodiments, the Fc-based chimeric protein complex includes a linker that connects the Fc domain, signaling agent, e.g. IL-2(s), and targeting moiety(ies). In some embodiments, the Fc-based chimeric protein complex includes a linker that connects each signaling agent, e.g. IL-2, and targeting moiety (or, if more than one targeting moiety, a signaling agent, e.g. IL-2, to one of the targeting moieties). In some embodiments, the Fc-based chimeric protein complex includes a linker that connects each signaling agent, e.g. IL-2, to the Fc domain. In some embodiments, the Fc-based chimeric protein complex includes a linker that connects each targeting moiety to the Fc domain. In some embodiments, the Fc-based chimeric protein complex includes a linker that connects a targeting moiety to another targeting moiety. In some embodiments, the Fc-based chimeric protein complex includes a linker that connects a signaling agent, e.g. IL-2, to another signaling agent.

[0354] In some embodiments, a Fc-based chimeric protein complex comprises two or more targeting moieties. In such embodiments, the targeting moieties can be the same targeting moiety or they can be different targeting moieties.

[0355] In some embodiments, a Fc-based chimeric protein complex comprises two or more signaling agents. In such embodiments, the signaling agents can be the same targeting moiety or they can be different targeting moieties.

[0356] By way of example, in some embodiments, the Fc-based chimeric protein complex comprises a Fc domain, at least two signaling agents (SA), and at least two targeting moieties TM, wherein the Fc domain, signaling agents, and targeting moieties are selected from any of the Fc domains, signaling agents, and targeting moieties disclosed herein. In some embodiments, the Fc domain is homodimeric.

[0357] In various embodiments, the Fc-based chimeric protein complex takes the form of any of the schematics of FIGS. 1A-F.

[0358] In various embodiments, the Fc-based chimeric protein complex takes the form of any of the schematics of FIGS. 2A-H.

[0359] In various embodiments, the Fc-based chimeric protein complex takes the form of any of the schematics of FIGS. 3A-H.

[0360] In various embodiments, the Fc-based chimeric protein complex takes the form of any of the schematics of FIGS. 4A-D.

[0361] In various embodiments, the Fc-based chimeric protein complex takes the form of any of the schematics of FIGS. 5A-F.

[0362] In various embodiments, the Fc-based chimeric protein complex takes the form of any of the schematics of FIGS. 6A-J.

[0363] In various embodiments, the Fc-based chimeric protein complex takes the form of any of the schematics of FIGS. 7A-D.

[0364] In various embodiments, the Fc-based chimeric protein complex takes the form of any of the schematics of FIGS. 8A-F.

[0365] In various embodiments, the Fc-based chimeric protein complex takes the form of any of the schematics of FIGS. 9A-J.

[0366] In various embodiments, the Fc-based chimeric protein complex takes the form of any of the schematics of FIGS. 10A-F.

[0367] In various embodiments, the Fc-based chimeric protein complex takes the form of any of the schematics of FIGS. 11A-L.

[0368] In various embodiments, the Fc-based chimeric protein complex takes the form of any of the schematics of FIGS. 12A-L.

[0369] In various embodiments, the Fc-based chimeric protein complex takes the form of any of the schematics of FIGS. 13A-F.

[0370] In various embodiments, the Fc-based chimeric protein complex takes the form of any of the schematics of FIGS. 14A-L.

[0371] In various embodiments, the Fc-based chimeric protein complex takes the form of any of the schematics of FIGS. 15A-L.

[0372] In various embodiments, the Fc-based chimeric protein complex takes the form of any of the schematics of FIGS. 16A-J.

[0373] In various embodiments, the Fc-based chimeric protein complex takes the form of any of the schematics of FIGS. 17A-J.

[0374] In various embodiments, the Fc-based chimeric protein complex takes the form of any of the schematics of FIGS. 18A-F.

[0375] In various embodiments, the Fc-based chimeric protein complex takes the form of any of the schematics of FIGS. 19A-F.

[0376] In various embodiments, the Fc-based chimeric protein complex takes the form of any of the schematics of FIGS. 20A-E.

[0377] In various embodiments, the Fc-based chimeric protein complex takes the form of the schematic of FIG. 31.

[0378] In various embodiments, the Fc-based chimeric protein complex takes the form of the schematic of FIG. 32.

[0379] In some embodiments, the present invention contemplates an Fc-based chimeric protein complex comprising one or more of the variants of Table 7 and/or one or more constructs listed in Table 7 within the column “ALN2 variant”.

[0380] In some embodiments, the signaling agents are linked to the targeting moieties and the targeting moieties are linked to the Fc domain on the same terminus (see FIGS. 1A-F). In some embodiments, the Fc domain is homodimeric.

[0381] In some embodiments, the signaling agents and targeting moieties are linked to the Fc domain, wherein the targeting moieties and signaling agents are linked on the same terminus (see FIGS. 1A-F). In some embodiments, the Fc domain is homodimeric.

[0382] In some embodiments, the targeting moieties are linked to signaling agents and the signaling agents are linked to the Fc domain on the same terminus (see FIGS. 1A-F). In some embodiments, the Fc domain is homodimeric.

[0383] In some embodiments, the homodimeric Fc-based chimeric protein complex has two or more targeting moieties.

[0384] In some embodiments, there are four targeting moieties and two signaling agents, the targeting moieties are linked to the Fc domain and the signaling agents are linked to targeting moieties on the same terminus (see FIGS. 2A-H). In some embodiments, the Fc domain is homodimeric. In some embodiments, where there are four targeting moieties and two signaling agents, two targeting moieties are linked to the Fc domain and two targeting moieties are linked to the signaling agents, which are linked to the Fc domain on the same terminus (see FIGS. 2A-H). In some embodiments, the Fc domain is homodimeric. In some embodiments, where there are four targeting moieties and two signaling agents, two targeting moieties are linked to each other and one of the targeting moieties of from each pair is linked to the Fc domain on the same terminus and the signaling agents are linked to the Fc domain on the same terminus (see FIGS. 2A-H). In some embodiments, the Fc domain is homodimeric. In some embodiments, where there are four targeting moieties and two signaling agents, two targeting moieties are linked to each other, wherein one of the targeting moieties of from each pair is linked to a signaling agent, e.g. IL-2, and the other targeting moiety of the pair is linked the Fc domain, wherein the targeting moieties linked to the Fc domain are linked on the same terminus (see FIGS. 2A-H). In some embodiments, the Fc domain is homodimeric.

[0385] In some embodiments, the homodimeric Fc-based chimeric protein complex has two or more signaling agents. In some embodiments, where there are four signaling agents and two targeting moieties, two signaling agents are linked to each other and one of the signaling agents of from pair is linked to the Fc domain on the same terminus and the targeting moieties are linked to the Fc domain on the same terminus (see FIGS. 3A-H). In some embodiments, the Fc domain is homodimeric. In some embodiments, where there are four signaling agents and two targeting moieties, two signaling agents are linked to the Fc domain one the same terminus and two of the signaling agents are each linked to a targeting moiety, wherein the targeting moieties are linked to the Fc domain at the same terminus (see FIGS. 3A-H). In some embodiments, the Fc domain is homodimeric. In some embodiments, where there are four signaling agents and two targeting moieties, two signaling agents are linked to each other and one of the signaling agents of from pair is linked to a targeting moiety and the targeting moieties are linked to the Fc domain on the same terminus (see FIGS. 3A-H). In some embodiments, the Fc domain is homodimeric.

[0386] By way of example, in some embodiments, the Fc-based chimeric protein complex comprise a Fc domain, wherein the Fc domain comprises ionic pairing mutation(s) and/or knob-in-hole mutation(s), at least one signaling agent, e.g. IL-2, and at least one targeting moiety, wherein the ionic pairing motif and/or a knob-in-hole motif, signaling agent, e.g. IL-2, and targeting moiety are selected from any of the ionic pairing motif and/or a knob-in-hole motif, signaling agents, and targeting moieties disclosed herein. In some embodiments, the Fc domain is heterodimeric. In some embodiments, the Fc domain comprises a mutation that reduces or eliminates its effector function.

[0387] In some embodiments, the signaling agent, e.g. IL-2, is linked to the targeting moiety, which is linked to the Fc domain (see FIGS. 10A-F and 13A-F). In some embodiments, the targeting moiety is linked to the signaling agent, e.g. IL-2, which is linked to the Fc domain (see FIGS. 10A-F and 13A-F). In some embodiments, the Fc domain is heterodimeric. In some embodiments, the Fc domain comprises a mutation that reduces or eliminates its effector function.

[0388] In some embodiments, the signaling agent, e.g. IL-2, and targeting moiety are linked to the Fc domain (see FIGS. 4A-D, 7A-D, 10A-F, and 13A-F). In some embodiments, the targeting moiety and the signaling agent, e.g. IL-2, are linked to different Fc chains on the same terminus (see FIGS. 4A-D and 7A-D). In some embodiments, the targeting moiety and the signaling agent, e.g. IL-2, are linked to different Fc chains on different termini (see FIGS. 4A-D and 7A-D). In some embodiments, the targeting moiety and the signaling agent, e.g. IL-2, are linked to the same Fc chain (see FIGS. 10A-F and 13A-F). In some embodiments, the Fc domain is heterodimeric. In some embodiments, the Fc domain comprises a mutation that reduces or eliminates its effector function.

[0389] In some embodiments, where there are one signaling agent, e.g. IL-2, and two targeting moieties, the signaling agent, e.g. IL-2, is linked to the Fc domain and two targeting moieties can be: 1) linked to each other with one of the targeting moieties linked to the Fc domain; or 2) each linked to the Fc domain (see FIGS. 5A-F, 8A-F, 11A-L, 14A-L, 16A-J, and 17A-J). In some embodiments, the targeting moieties are linked on one Fc chain and the signaling agent, e.g. IL-2, is on the other Fc chain (see FIGS. 5A-F and 8A-F). In some embodiments, the paired targeting moieties and the signaling agent, e.g. IL-2 are linked to the same Fc chain (see FIGS. 11A-L and 14A-L). In some embodiments, a targeting moiety is linked to the Fc domain and the other targeting moiety is linked to the signaling agent, e.g. IL-2, and the paired targeting moiety is linked to the Fc domain (see FIGS. 11A-L, 14A-L, 16A-J, and 17A-J). In some embodiments, the unpaired targeting moiety and paired targeting moiety are linked to the same Fc chain (see FIGS. 11A-L and 14A-L). In some embodiments, the unpaired targeting moiety and paired targeting moiety are linked to different Fc chains (see FIGS. 16A-J and 17A-J). In some embodiments, the unpaired targeting moiety and paired targeting moiety are linked on the same terminus (see FIGS. 16A-J and 17A-J). In some embodiments, the Fc domain is heterodimeric. In some embodiments, the Fc domain comprises a mutation that reduces or eliminates its effector function.

[0390] In some embodiments, where there are one signaling agent, e.g. IL-2, and two targeting moieties, a targeting moiety is linked to the signaling agent, e.g. IL-2, which is linked to the Fc domain, and the unpaired targeting moiety is linked the Fc domain (see FIGS. 11A-L, 14A-L, 16A-J, and 17A-J). In some embodiments, the paired signaling agent, e.g. IL-2, and unpaired targeting moiety are linked to the same Fc chain (see FIGS. 11A-L and 14A-L). In some embodiments, the paired signaling agent, e.g. IL-2, and unpaired targeting moiety are linked to different Fc chains (see FIGS. 16A-J and 17A-J). In some embodiments, the paired signaling agent, e.g. IL-2, and unpaired targeting moiety are linked on the same terminus (see FIGS. 16A-J and 17A-J). In some embodiments, the Fc domain is heterodimeric. In some embodiments, the Fc domain comprises a mutation that reduces or eliminates its effector function.

[0391] In some embodiments, where there are one signaling agent, e.g. IL-2, and two targeting moieties, the targeting moieties are linked together and the signaling agent, e.g. IL-2, is linked to one of the paired targeting moieties, wherein the targeting moiety not linked to the signaling agent, e.g. IL-2, is linked to the Fc domain (see FIGS. 11A-L and 14A-L). In some embodiments, the Fc domain is heterodimeric. In some embodiments, the Fc domain comprises a mutation that reduces or eliminates its effector function.

[0392] In some embodiments, where there are one signaling agent, e.g. IL-2, and two targeting moieties, the targeting moieties are linked together and the signaling agent, e.g. IL-2, is linked to one of the paired targeting moieties, wherein the signaling agent, e.g. IL-2, is linked to the Fc domain (see FIGS. 11A-L and 14A-L). In some embodiments, the Fc domain is heterodimeric. In some embodiments, the Fc domain comprises a mutation that reduces or eliminates its effector function.

[0393] In some embodiments, where there are one signaling agent, e.g. IL-2, and two targeting moieties, the targeting moieties are both linked to the signaling agent, e.g. IL-2, wherein one of the targeting moieties is linked to the Fc domain (see FIGS. 11A-L and 14A-L). In some embodiments, the Fc domain is heterodimeric. In some embodiments, the Fc domain comprises a mutation that reduces or eliminates its effector function.

[0394] In some embodiments, where there are one signaling agent, e.g. IL-2, and two targeting moieties, the targeting moieties and the signaling agent, e.g. IL-2, are linked to the Fc domain (see FIGS. 16A-J and 17A-J). In some embodiments, the targeting moieties are linked on the terminus (see FIGS. 16A-J and 17A-J). In some embodiments, the Fc domain is heterodimeric. In some embodiments, the Fc domain comprises a mutation that reduces or eliminates its effector function.

[0395] In some embodiments, where there are two signaling agents and one targeting moiety, the signaling agents are linked to the Fc domain on the same terminus and the targeting moiety is linked to the Fc domain (see FIGS. 6A-J and 9A-J). In some embodiments, the signaling agents are linked to the Fc domain on the same Fc chain and the targeting moiety is linked on the other Fc chain (see FIGS. 18A-F and 19A-F). In some embodiments, the Fc domain is heterodimeric. In some embodiments, the Fc domain comprises a mutation that reduces or eliminates its effector function.

[0396] In some embodiments, where there are two signaling agents and one targeting moiety, a signaling agent, e.g. IL-2, is linked to the targeting moiety, which is linked to the Fc domain and the other signaling agent, e.g. IL-2, is linked to the Fc domain (see FIGS. 6A-J, 9A-J, 12A-L, and 15A-L). In some embodiments, the targeting moiety and the unpaired signaling agent, e.g. IL-2, are linked to different Fc chains (see FIGS. 6A-J and 9A-J). In some embodiments, the targeting moiety and the unpaired signaling agent, e.g. IL-2, are linked to different Fc chains on the same terminus (see FIGS. 6A-J and 9A-J). In some embodiments, the targeting moiety and the unpaired signaling agent, e.g. IL-2, are linked to different Fc chains on different termini (see FIGS. 6A-J and 9A-J). In some embodiments, the targeting moiety and the unpaired signaling agent, e.g. IL-2, are linked to the same Fc chains (see FIGS. 12A-L and 15A-L). In some embodiments, the Fc domain is heterodimeric. In some embodiments, the Fc domain comprises a mutation that reduces or eliminates its effector function.

[0397] In some embodiments, where there are two signaling agents and one targeting moiety, the targeting moiety is linked to a signaling agent, e.g. IL-2, which is linked to the Fc domain and the other signaling agent, e.g. IL-2, is linked to the Fc domain (see FIGS. 6A-J and 9A-J). In some embodiments, the paired signaling agent, e.g. IL-2, and the unpaired signaling agent, e.g. IL-2, are linked to different Fc chains (see FIGS. 6A-J and 9A-J). In some embodiments, the paired signaling agent, e.g. IL-2, and the unpaired signaling agent, e.g. IL-2, are linked to different Fc chains on the same terminus (see FIGS. 6A-J and 9A-J). In some embodiments, the paired signaling agent, e.g. IL-2, and the unpaired signaling agent, e.g. IL-2, are linked to different Fc chains on different termini (see FIGS. 6A-J and 9A-J). In some embodiments, the Fc domain is heterodimeric. In some embodiments, the Fc domain comprises a mutation that reduces or eliminates its effector function.

[0398] In some embodiments, where there are two signaling agents and one targeting moiety, the signaling agents are linked together and the targeting moiety is linked to one of the paired signaling agents, wherein the targeting moiety is linked to the Fc domain (see FIGS. 12A-L and 15A-L). In some embodiments, the Fc domain is heterodimeric. In some embodiments, the Fc domain comprises a mutation that reduces or eliminates its effector function.

[0399] In some embodiments, where there are two signaling agents and one targeting moiety, the signaling agents are linked together and one of the signaling agents is linked to the Fc domain and the targeting moiety is linked to the Fc domain (see FIGS. 12A-L, 15A-L, 18A-F, and 19A-F). In some embodiments, the paired signaling agents and targeting moiety are linked to the same Fc chain (see FIGS. 12A-L and 15A-L). In some embodiments, the paired signaling agents and targeting moiety are linked to different Fc chains (see FIGS. 18A-F and 19A-F). In some embodiments, the paired signaling agents and targeting moiety are linked to different Fc chains on the same terminus (see FIGS. 18A-F and 19A-F). In some embodiments, the Fc domain is heterodimeric. In some embodiments, the Fc domain comprises a mutation that reduces or eliminates its effector function.

[0400] In some embodiments, where there are two signaling agents and one targeting moiety, the signaling agents are both linked to the targeting moiety, wherein one of the signaling agents is linked to the Fc domain (see FIGS. 12A-L and 15A-L). In some embodiments, the Fc domain is heterodimeric. In some embodiments, the Fc domain comprises a mutation that reduces or eliminates its effector function.

[0401] In some embodiments, where there are two signaling agents and one targeting moiety, the signaling agents are linked together and one of the signaling agents is linked to the targeting moiety and the other signaling agent, e.g. IL-2, is linked to the Fc domain (see FIGS. 12A-L and 15A-L).

[0402] In some embodiments, where there are two signaling agents and one targeting moiety, each signaling agent, e.g. IL-2, is linked to the Fc domain and the targeting moiety is linked to one of the signaling agents (see FIGS. 12A-L and 15A-L). In some embodiments, the signaling agents are linked to the same Fc chain (see FIGS. 12A-L and 15A-L).

[0403] In some embodiments, a targeting moiety or signaling agent, e.g. IL-2, is linked to the Fc domain, comprising one or both of C_{H}2 and C_{H}3 domains, and optionally a hinge region. For example, vectors encoding the targeting moiety, signaling agent, e.g. IL-2, or combination thereof, linked as a single nucleotide sequence to an Fc domain can be used to prepare such polypeptides.

[0404] In some embodiments, the Fc-based chimeric protein complex comprises a polypeptide having an amino acid sequence having at least 90%, or at least 95%, or at least 96%, or at least 97%, or at least 98%, or at least 99% identity with any one of SEQ ID NOs: 291-296, 298-335, 340-345, 347-359, 361-368, 371-375, 377-449.

[0405] In some embodiments, the Fc-based chimeric protein complex comprises a polypeptide having an amino acid sequence having at least 95%, or at least 98%, or at least 99% identity with any one of SEQ ID NOs: 291-296, 298-335. In embodiments, the Fc-based chimeric protein complex comprises a polypeptide having an amino acid sequence selected from SEQ ID NOs: 291-296, 298-335 and less than 10 mutations to the amino acid sequence. In embodiments, the Fc-based chimeric protein complex comprises a polypeptide having an amino acid sequence selected from SEQ ID NOs: 291-296, 298-335, and less than 5 mutations to the amino acid sequence. In some embodiments, the Fc-based chimeric protein complex comprises a polypeptide having an amino acid sequence selected from SEQ ID NOs: 291-296, 298-335. In particular embodiments, the Fc-based chimeric protein complex comprises a polypeptide having an amino acid sequence having at least 95%, or at least 98%, or at least 99% identity with any one SEQ ID NOs: 292, 293, 294, 299, 301, 310, 311, 312, 315, 316, 319, 320, 325, 328, 332, 333, and 335. In particular embodiments, the Fc-based chimeric protein complex comprises a polypeptide having an amino acid sequence selected from SEQ ID NOs: 292, 293, 294, 299, 301, 310, 311, 312, 315, 316, 319, 320, 325, 328, 332, 333, and 335.

### Additional Signaling Agents

[0406] In one aspect, the present invention provides a chimeric proteins or chimeric protein complexes such as Fc-based chimeric protein complex comprising one or more signaling agents (for instance, an immune-modulating agent) in addition to the modified IL-2 described herein. In illustrative embodiments, the chimeric proteins or chimeric protein complexes such as Fc-based chimeric protein complex may comprise two, three, four, five, six, seven, eight, nine, ten or more signaling agents in addition to the modified IL-2 described herein. In various embodiments, the additional signaling agent is modified to have reduced affinity or activity for one or more of its receptors, which allows for attenuation of activity (inclusive of agonism or antagonism) and/or prevents non-specific signaling or undesirable sequestration of the chimeric proteins or chimeric protein complexes such as Fc-based chimeric protein complex.

[0407] In various embodiments, the additional signaling agent is antagonistic in its wild type form and bears one or more mutations that attenuate its antagonistic activity. In various embodiments, the additional signaling agent is antagonistic due to one or more mutations, e.g. an agonistic signaling agent is converted to an antagonistic signaling agent and, such a converted signaling agent, optionally, also bears one or more mutations that attenuate its antagonistic activity (e.g. as described in WO 2015/007520, the entire contents of which are hereby incorporated by reference).

[0408] In various embodiments, the additional signaling agent is selected from modified versions of cytokines, growth factors, and hormones. Illustrative examples of such cytokines, growth factors, and hormones include, but are not limited to, lymphokines, monokines, traditional polypeptide hormones, such as human growth hormone, N-methionyl human growth hormone, and bovine growth hormone; parathyroid hormone; thyroxine; insulin; proinsulin; relaxin; prorelaxin; glycoprotein hormones such as follicle stimulating hormone (FSH), thyroid stimulating hormone (TSH), and luteinizing hormone (LH); hepatic growth factor; fibroblast growth factor; prolactin; placental lactogen; tumor necrosis factor-α and tumor necrosis factor-β; mullerian-inhibiting substance; mouse gonadotropin-associated peptide; inhibin; activin; vascular endothelial growth factor; integrin; thrombopoietin (TPO); nerve growth factors such as NGF-α; platelet-growth factor; transforming growth factors (TGFs) such as TGF-α and TGF-β; insulin-like growth factor- and -II; osteo inductive factors; interferons such as, for example, interferon-α, interferon-β and interferon-γ (and interferon type I, II, and III), colony stimulating factors (CSFs) such as macrophage-CSF (M-CSF); granulocyte-macrophage-CSF (GM-CSF); and granulocyte-CSF (G-CSF); interleukins (ILs) such as, for example, IL-1B, IL-1a, IL-2, IL-3, IL-4, IL-5, IL-6, IL-7, IL-8, IL-9, IL-10, IL-11, IL-12, IL-13, IL-15, and IL-18; a tumor necrosis factor such as, for example, TNF-α or TNF-β; and other polypeptide factors including, for example, LIF and kit ligand (KL). As used herein, cytokines, growth factors, and hormones include proteins obtained from natural sources or produced from recombinant bacterial, eukaryotic or mammalian cell culture systems and biologically active equivalents of the native sequence cytokines.

[0409] In some embodiments, the additional signaling agent is a modified version of a growth factor selected from, but not limited to, transforming growth factors (TGFs) such as TGF-α and TGF-β, epidermal growth factor (EGF), insulin-like growth factor such as insulin-like growth factor-I and -II, fibroblast growth factor (FGF), heregulin, platelet-derived growth factor (PDGF), vascular endothelial growth factor (VEGF).

[0410] In an embodiment, the growth factor is a modified version of a fibroblast growth factor (FGF). Illustrative FGFs include, but are not limited to, FGF1, FGF2, FGF3, FGF4, FGF5, FGF6, FGF7, FGF8, FGF9, FGF10, FGF11, FGF12, FGF13, FGF14, murine FGF15, FGF16, FGF17, FGF18, FGF19, FGF20, FGF21, FGF22, and FGF23.

[0411] In an embodiment, the growth factor is a modified version of a vascular endothelial growth factor (VEGF). Illustrative VEGFs include, but are not limited to, VEGF-A, VEGF-B, VEGF-C, VEGF-D, and PGF and isoforms thereof including the various isoforms of VEGF-A such as VEGF₁₂₁, VEGF₁₂₁b, VEGF₁₄₅, VEGF₁₆₅, VEGF₁₆₅b, VEGF₁₈₉, and VEGF₂₀₆.

[0412] In an embodiment, the growth factor is a modified version of a transforming growth factor (TGF). Illustrative TGFs include, but are not limited to, TGF-α and TGF-β and subtypes thereof including the various subtypes of TGF-β including TGFβ1, TGFβ2, and TGFβ3.

[0413] In some embodiments, the additional signaling agent is a modified version of a hormone selected from, but not limited to, human chorionic gonadotropin, gonadotropin releasing hormone, an androgen, an estrogen, thyroid-stimulating hormone, follicle-stimulating hormone, luteinizing hormone, prolactin, growth hormone, adrenocorticotropic hormone, antidiuretic hormone, oxytocin, thyrotropin-releasing hormone, growth hormone releasing hormone, corticotropin-releasing hormone, somatostatin, dopamine, melatonin, thyroxine, calcitonin, parathyroid hormone, glucocorticoids, mineralocorticoids, adrenaline, noradrenaline, progesterone, insulin, glucagon, amylin, calcitriol, calciferol, atrial-natriuretic peptide, gastrin, secretin, cholecystokinin, neuropeptide Y, ghrelin, PYY3-36, insulin-like growth factor (IGF), leptin, thrombopoietin, erythropoietin (EPO), and angiotensinogen.

[0414] In some embodiments, the additional signaling agent is an immune-modulating agent, e.g. one or more of an interleukin, interferon, and tumor necrosis factor.

[0415] In some embodiments, the additional signaling agent is an interleukin, including for example IL-1B; IL-2; IL-3; IL-4; IL-5; IL-6; IL-7; IL-8; IL-9; IL-10; IL-11; IL-12; IL-13; IL-14; IL-15; IL-16; IL-17; IL-18; IL-19; IL-20; IL-21; IL-22; IL-23; IL-24; IL-25; IL-26; IL-27; IL-28; IL-29; IL-30; IL-31; IL-32; IL-33; IL-35; IL-36 or a fragment, variant, analogue, or family-member thereof. Interleukins are a group of multi-functional cytokines synthesized by lymphocytes, monocytes, and macrophages. Known functions include stimulating proliferation of immune cells (e.g., T helper cells, B cells, eosinophils, and lymphocytes), chemotaxis of neutrophils and T lymphocytes, and/or inhibition of interferons. Interleukin activity can be determined using assays known in the art: Matthews et al., in Lymphokines and Interferens: A Practical Approach, Clemens et al., eds, IRL Press, Washington, D.C. 1987, pp. 221-225; and Orencole & Dinarello (1989) Cytokine 1, 14-20.

[0416] In some embodiments, the signaling agent is a modified version of an interferon such as interferon types I, II, and III. Illustrative interferons, including for example, interferon-α-1, 2, 4, 5, 6, 7, 8, 10, 13, 14, 16, 17, and 21, interferon-β and interferon-γ, interferon κ, interferon ε, interferon τ, and interferon ω̅.

[0417] In embodiments, the additional signaling agent is a type I interferon. In embodiments, the type I interferon is selected from IFNα2, IFNα1, IFN-β, IFN-γ, Consensus IFN, IFN-ε, IFN-κ, IFN-τ, IFN-δ, and IFN-v.

[0418] In some embodiments, the additional signaling agent is a modified version of a tumor necrosis factor (TNF) or a protein in the TNF family, including but not limited to, TNF-α, TNF-β, LT-β, CD40L, CD27L, CD30L, FASL, 4-1BBL, OX40L, and TRAIL.

[0419] In various embodiments, the additional signaling agent is a modified (e.g. mutant) form of the signaling agent having one or more mutations. In various embodiments, the mutations allow for the modified signaling agent to have one or more of attenuated activity such as one or more of reduced binding affinity, reduced endogenous activity, and reduced specific bioactivity relative to unmodified or unmutated, i.e. the wild type form of the signaling agent (e.g. comparing the same signaling agent in a wild type form versus a modified (e.g. mutant) form). In various embodiments, the mutations allow for the modified signaling agent to have one or more of attenuated activity such as one or more of reduced binding affinity, reduced endogenous activity, and reduced specific bioactivity relative to unmodified or unmutated signaling agent, i.e. the unmutated IL-2. In some embodiments, the mutations which attenuate or reduce binding or affinity include those mutations which substantially reduce or ablate binding or activity. In some embodiments, the mutations which attenuate or reduce binding or affinity are different than those mutations which substantially reduce or ablate binding or activity. Consequentially, in various embodiments, the mutations allow for the signaling agent to be more safe, e.g. have reduced systemic toxicity, reduced side effects, and reduced off-target effects relative to unmutated, i.e. wild type, signaling agent (e.g. comparing the same signaling agent in a wild type form versus a modified (e.g. mutant) form). In various embodiments, the mutations allow for the signaling agent to be safer, e.g. have reduced systemic toxicity, reduced side effects, and reduced off-target effects relative to unmutated signaling agent, e.g. the unmutated sequence of IL-2.

[0420] In various embodiments, the additional signaling agent is modified to have one or more mutations that reduce its binding affinity or activity for one or more of its receptors. In some embodiments, the signaling agent is modified to have one or more mutations that substantially reduce or ablate binding affinity or activity for the receptors. In some embodiments, the activity provided by the wild type signaling agent is agonism at the receptor (e.g. activation of a cellular effect at a site of therapy). For example, the wild type signaling agent may activate its receptor. In such embodiments, the mutations result in the modified signaling agent to have reduced or ablated activating activity at the receptor. For example, the mutations may result in the modified signaling agent to deliver a reduced activating signal to a target cell or the activating signal could be ablated. In some embodiments, the activity provided by the wild type signaling agent is antagonism at the receptor (e.g. blocking or dampening of a cellular effect at a site of therapy). For example, the wild type signaling agent may antagonize or inhibit the receptor. In these embodiments, the mutations result in the modified signaling agent to have a reduced or ablated antagonizing activity at the receptor. For example, the mutations may result in the modified signaling agent to deliver a reduced inhibitory signal to a target cell or the inhibitory signal could be ablated. In various embodiments, the signaling agent is antagonistic due to one or more mutations, e.g. an agonistic signaling agent is converted to an antagonistic signaling agent (e.g. as described in WO 2015/007520, the entire contents of which are hereby incorporated by reference) and, such a converted signaling agent, optionally, also bears one or more mutations that reduce its binding affinity or activity for one or more of its receptors or that substantially reduce or ablate binding affinity or activity for one or more of its receptors.

[0421] In some embodiments, the reduced affinity or activity at the receptor is inducible or restorable by attachment with one or more of the targeting moieties or upon inclusion in the Fc-based chimeric protein complex disclosed herein. In other embodiments, the reduced affinity or activity at the receptor is not substantially inducible or restorable by the activity of one or more of the targeting moieties or upon inclusion in the Fc-based chimeric protein complex disclosed herein.

[0422] In various embodiments, the additional signaling agent is active on target cells because the targeting moiety(ies) compensates for the missing/insufficient binding (e.g., without limitation and/or avidity) required for substantial activation. In various embodiments, the modified signaling agent is substantially inactive en route to the site of therapeutic activity and has its effect substantially on specifically targeted cell types which greatly reduces undesired side effects.

[0423] In some embodiments, the additional signaling agent may include one or more mutations that attenuate or reduce binding or affinity for one receptor (i.e., a therapeutic receptor) and one or more mutations that substantially reduce or ablate binding or activity at a second receptor. In such embodiments, these mutations may be at the same or at different positions (i.e., the same mutation or multiple mutations). In some embodiments, the mutation(s) that reduce binding and/or activity at one receptor is different than the mutation(s) that substantially reduce or ablate at another receptor. In some embodiments, the mutation(s) that reduce binding and/or activity at one receptor is the same as the mutation(s) that substantially reduce or ablate at another receptor. In some embodiments, the present chimeric proteins or chimeric protein complexes such as Fc-based chimeric protein complexes have a modified signaling agent that has both mutations that attenuate binding and/or activity at a therapeutic receptor and therefore allow for a more controlled, on-target therapeutic effect (e.g. relative wild type signaling agent) and mutations that substantially reduce or ablate binding and/or activity at another receptor and therefore reduce side effects (e.g. relative to wild type signaling agent).

[0424] In some embodiments, the substantial reduction or ablation of binding or activity is not substantially inducible or restorable with a targeting moiety or upon inclusion in the Fc-based chimeric protein complex disclosed herein. In some embodiments, the substantial reduction or ablation of binding or activity is inducible or restorable with a targeting moiety or upon inclusion in the Fc-based chimeric protein complex disclosed herein. In various embodiments, substantially reducing or ablating binding or activity at a second receptor also may prevent deleterious effects that are mediated by the other receptor. Alternatively, or in addition, substantially reducing or ablating binding or activity at the other receptor causes the therapeutic effect to improve as there is a reduced or eliminated sequestration of the therapeutic chimeric proteins or chimeric protein complexes such as Fc-based chimeric protein complexes away from the site of therapeutic action. For instance, in some embodiments, this obviates the need of high doses of the chimeric proteins or chimeric protein complexes such as Fc-based chimeric protein complexes that compensate for loss at the other receptor. Such ability to reduce dose further provides a lower likelihood of side effects.

[0425] In various embodiments, the additional modified signaling agent comprises one or more mutations that cause the signaling agent to have reduced, substantially reduced, or ablated affinity, e.g. binding (e.g. K_{D}) and/or activation (for instance, when the modified signaling agent is an agonist of its receptor, measurable as, for example, K_{A} and/or EC₅₀) and/or inhibition (for instance, when the modified signaling agent is an antagonist of its receptor, measurable as, for example, K_{I} and/or IC₅₀), for one or more of its receptors. In various embodiments, the reduced affinity at the signaling agent's receptor allows for attenuation of activity (inclusive of agonism or antagonism). In such embodiments, the modified signaling agent has about 1%, or about 3%, about 5%, about 10%, about 15%, about 20%, about 25%, about 30%, about 35%, about 40%, about 45%, about 50%, about 60%, about 65%, about 70%, about 75%, about 80%, about 85%, about 90%, about 95%, or about 10%-20%, about 20%-40%, about 50%, about 40%-60%, about 60%-80%, about 80%-100% of the affinity for the receptor relative to the wild type signaling agent. In some embodiments, the binding affinity is at least about 2-fold lower, about 3-fold lower, about 4-fold lower, about 5-fold lower, about 6-fold lower, about 7-fold lower, about 8-fold lower, about 9-fold lower, at least about 10-fold lower, at least about 15-fold lower, at least about 20-fold lower, at least about 25-fold lower, at least about 30-fold lower, at least about 35-fold lower, at least about 40-fold lower, at least about 45-fold lower, at least about 50-fold lower, at least about 100-fold lower, at least about 150-fold lower, or about 10-50-fold lower, about 50-100-fold lower, about 100-150-fold lower, about 150-200-fold lower, or more than 200-fold lower relative to the wild type signaling agent (including, by way of non-limitation, relative to the unmutated IL-2).

[0426] In embodiments wherein the chimeric proteins or chimeric protein complexes such as Fc-based chimeric protein complex has mutations that reduce binding at one receptor and substantially reduce or ablate binding at a second receptor, the attenuation or reduction in binding affinity of a modified signaling agent for one receptor is less than the substantial reduction or ablation in affinity for the other receptor. In some embodiments, the attenuation or reduction in binding affinity of a modified signaling agent for one receptor is less than the substantial reduction or ablation in affinity for the other receptor by about 1%, or about 3%, about 5%, about 10%, about 15%, about 20%, about 25%, about 30%, about 35%, about 40%, about 45%, about 50%, about 60%, about 65%, about 70%, about 75%, about 80%, about 85%, about 90%, or about 95%. In various embodiments, substantial reduction or ablation refers to a greater reduction in binding affinity and/or activity than attenuation or reduction.

[0427] In various embodiments, the additional modified signaling agent comprises one or more mutations that reduce the endogenous activity of the signaling agent to about 75%, or about 70%, or about 60%, or about 50%, or about 40%, or about 30%, or about 25%, or about 20%, or about 10%, or about 5%, or about 3%, or about 1%, e.g., relative to the wild type signaling agent (including, by way of non-limitation, relative to the unmutated IL-2).

[0428] In various embodiments, the additional modified signaling agent comprises one or more mutations that cause the signaling agent to have reduced affinity and/or activity for a receptor of any one of the cytokines, growth factors, and hormones as described herein.

[0429] In some embodiments, the additional modified signaling agent comprises one or more mutations that cause the signaling agent to have reduced affinity for its receptor that is lower than the binding affinity of the targeting moiety(ies) for its(their) receptor(s). In some embodiments, this binding affinity differential is between signaling agent/receptor and targeting moiety/receptor on the same cell. In some embodiments, this binding affinity differential allows for the signaling agent, e.g. mutated signaling agent, to have localized, on-target effects and to minimize off-target effects that underlie side effects that are observed with wild type signaling agent. In some embodiments, this binding affinity is at least about 2-fold, or at least about 5-fold, or at least about 10-fold, or at least about 15-fold lower, or at least about 25-fold, or at least about 50-fold lower, or at least about 100-fold, or at least about 150-fold.

[0430] Receptor binding activity may be measured using methods known in the art. For example, affinity and/or binding activity may be assessed by Scatchard plot analysis and computer-fitting of binding data (e.g. Scatchard, 1949) or by reflectometric interference spectroscopy under flow through conditions, as described by Brecht et al. (1993), the entire contents of all of which are hereby incorporated by reference. In some embodiments, receptor binding activity is measured using bio-layer interferometry (BLI).

[0431] The amino acid sequences of the wild type signaling agents described herein are well known in the art. Accordingly, in various embodiments the additional modified signaling agent comprises an amino acid sequence that has at least about 60%, or at least about 61%, or at least about 62%, or at least about 63%, or at least about 64%, or at least about 65%, or at least about 66%, or at least about 67%, or at least about 68%, or at least about 69%, or at least about 70%, or at least about 71%, or at least about 72%, or at least about 73%, or at least about 74%, or at least about 75%, or at least about 76%, or at least about 77%, or at least about 78%, or at least about 79%, or at least about 80%, or at least about 81%, or at least about 82%, or at least about 83%, or at least about 84%, or at least about 85%, or at least about 86%, or at least about 87%, or at least about 88%, or at least about 89%, or at least about 90%, or at least about 91%, or at least about 92%, or at least about 93%, or at least about 94%, or at least about 95%, or at least about 96%, or at least about 97%, or at least about 98%, or at least about 99% sequence identity with the known wild type amino acid sequences of the signaling agents described herein (e.g. about 60%, or about 61%, or about 62%, or about 63%, or about 64%, or about 65%, or about 66%, or about 67%, or about 68%, or about 69%, or about 70%, or about 71%, or about 72%, or about 73%, or about 74%, or about 75%, or about 76%, or about 77%, or about 78%, or about 79%, or about 80%, or about 81%, or about 82%, or about 83%, or about 84%, or about 85%, or about 86%, or about 87%, or about 88%, or about 89%, or about 90%, or about 91%, or about 92%, or about 93%, or about 94%, or about 95%, or about 96%, or about 97%, or about 98%, or about 99% sequence identity).

[0432] In various embodiments the additional modified signaling agent comprises an amino acid sequence that has at least about 60%, or at least about 61%, or at least about 62%, or at least about 63%, or at least about 64%, or at least about 65%, or at least about 66%, or at least about 67%, or at least about 68%, or at least about 69%, or at least about 70%, or at least about 71%, or at least about 72%, or at least about 73%, or at least about 74%, or at least about 75%, or at least about 76%, or at least about 77%, or at least about 78%, or at least about 79%, or at least about 80%, or at least about 81%, or at least about 82%, or at least about 83%, or at least about 84%, or at least about 85%, or at least about 86%, or at least about 87%, or at least about 88%, or at least about 89%, or at least about 90%, or at least about 91%, or at least about 92%, or at least about 93%, or at least about 94%, or at least about 95%, or at least about 96%, or at least about 97%, or at least about 98%, or at least about 99% sequence identity with any of the sequences disclosed herein (e.g. about 60%, or about 61%, or about 62%, or about 63%, or about 64%, or about 65%, or about 66%, or about 67%, or about 68%, or about 69%, or about 70%, or about 71%, or about 72%, or about 73%, or about 74%, or about 75%, or about 76%, or about 77%, or about 78%, or about 79%, or about 80%, or about 81%, or about 82%, or about 83%, or about 84%, or about 85%, or about 86%, or about 87%, or about 88%, or about 89%, or about 90%, or about 91%, or about 92%, or about 93%, or about 94%, or about 95%, or about 96%, or about 97%, or about 98%, or about 99% sequence identity).

[0433] In various embodiments, the additional modified signaling agent comprises an amino acid sequence having one or more amino acid mutations. In some embodiments, the one or more amino acid mutations may be independently selected from substitutions, insertions, deletions, and truncations.

[0434] In some embodiments, the amino acid mutations are amino acid substitutions, and may include conservative and/or non-conservative substitutions as described herein.

[0435] As described herein, the additional modified signaling agents bear mutations that affect affinity and/or activity at one or more receptors. In various embodiments, there is reduced affinity and/or activity at a therapeutic receptor, e.g. a receptor through which a desired therapeutic effect is mediated (e.g. agonism or antagonism). In various embodiments, the modified signaling agents bear mutations that substantially reduce or ablate affinity and/or activity at a receptor, e.g. a receptor through which a desired therapeutic effect is not mediated (e.g. as the result of promiscuity of binding). The receptors of any modified signaling agents, e.g. one of the cytokines, growth factors, and hormones as described herein, are known in the art.

[0436] Illustrative mutations which provide reduced affinity and/or activity (e.g. agonistic) at a receptor are found in WO 2013/107791 (e.g. with regard to interferons), WO 2015/007542 (e.g. with regard to interleukins), and WO 2015/007903 (e.g. with regard to TNF), the entire contents of each of which are hereby incorporated by reference. Illustrative mutations which provide reduced affinity and/or activity (e.g. antagonistic) at a therapeutic receptor are found in WO 2015/007520, the entire contents of which are hereby incorporated by reference.

[0437] In some embodiments, the additional modified signaling agent comprises one or more mutations that cause the signaling agent to have reduced affinity and/or activity for a type I cytokine receptor, a type II cytokine receptor, a chemokine receptor, a receptor in the Tumor Necrosis Factor Receptor (TNFR) superfamily, TGF-beta Receptors, a receptor in the immunoglobulin (Ig) superfamily, and/or a receptor in the tyrosine kinase superfamily.

[0438] In various embodiments, the receptor for the additional signaling agent is a Type I cytokine receptor. Type I cytokine receptors are known in the art and include, but are not limited to receptors for IL2 (beta-subunit), IL3, IL4, IL5, IL6, IL7, IL9, IL11, IL12, GM-CSF, G-CSF, LIF, CNTF, and also the receptors for Thrombopoietin (TPO), Prolactin, and Growth hormone. Illustrative type I cytokine receptors include, but are not limited to, GM-CSF receptor, G-CSF receptor, LIF receptor, CNTF receptor, TPO receptor, and type I IL receptors.

[0439] In various embodiments, the receptor for the additional signaling agent is a Type II cytokine receptor. Type II cytokine receptors are multimeric receptors composed of heterologous subunits and are receptors mainly for interferons. This family of receptors includes, but is not limited to, receptors for interferon-α, interferon-β and interferon-γ, IL10, IL22, and tissue factor. Illustrative type II cytokine receptors include, but are not limited to, IFNα receptor (e.g. IFNAR1 and IFNAR2), IFNβ receptor, IFNγ receptor (e.g. IFNGR1 and IFNGR2), and type II IL receptors.

[0440] In various embodiments, the receptor for the additional signaling agent is a G protein-coupled receptor. Chemokine receptors are G protein-coupled receptors with seven transmembrane structure and coupled to G-protein for signal transduction. Chemokine receptors include, but are not limited to, CC chemokine receptors, CXC chemokine receptors, CX3C chemokine receptors, and XC chemokine receptor (XCR1). Illustrative chemokine receptors include, but are not limited to, CCR1, CCR2, CCR3, CCR4, CCR5, CCR6, CCR7, CCR8, CCR9, CCR10, CXCR1, CXCR2, CXCR3, CXCR3B, CXCR4, CXCR5, CSCR6, CXCR7, XCR1, and CX3CR1.

[0441] In various embodiments, the receptor for the additional signaling agent is a TNFR family member. Tumor necrosis factor receptor (TNFR) family members share a cysteine-rich domain (CRD) formed of three disulfide bonds surrounding a core motif of CXXCXXC creating an elongated molecule. Illustrative tumor necrosis factor receptor family members include: CDI 20a (TNFRSFIA), CD 120b (TNFRSFIB), Lymphotoxin beta receptor (LTBR, TNFRSF3), CD 134 (TNFRSF4), CD40 (CD40, TNFRSF5), FAS (FAS, TNFRSF6), TNFRSF6B (TNFRSF6B), CD27 (CD27, TNFRSF7), CD30 (TNFRSF8), CD137 (TNFRSF9), TNFRSFIOA (TNFRSFIOA), TNFRSFIOB, (TNFRSFIOB), TNFRSFIOC (TNFRSFIOC), TNFRSFIOD (TNFRSFIOD), RANK (TNFRSFI IA), Osteoprotegerin (TNFRSFI IB), TNFRSF12A (TNFRSF12A), TNFRSF13B (TNFRSF13B), TNFRSF13C (TNFRSF13C), TNFRSF14 (TNFRSF14), Nerve growth factor receptor (NGFR, TNFRSF16), TNFRSF17 (TNFRSF17), TNFRSF18 (TNFRSF18), TNFRSF19 (TNFRSF19), TNFRSF21 (TNFRSF21), and TNFRSF25 (TNFRSF25).

[0442] In various embodiments, the receptor for the additional signaling agent is a TGF-beta receptor. TGF-beta receptors are single pass serine/threonine kinase receptors. TGF-beta receptors include, but are not limited to, TGFBR1, TGFBR2, and TGFBR3.

[0443] In various embodiments, the receptor for the additional signaling agent is an Ig superfamily receptor. Receptors in the immunoglobulin (Ig) superfamily share structural homology with immunoglobulins. Receptors in the Ig superfamily include, but are not limited to, interleukin-1 receptors, CSF-1R, PDGFR (e.g. PDGFRA and PDGFRB), and SCFR.

[0444] In various embodiments, the receptor for the additional signaling agent is a tyrosine kinase superfamily receptor. Receptors in the tyrosine kinase superfamily are well known in the art. There are about 58 known receptor tyrosine kinases (RTKs), grouped into 20 subfamilies. Receptors in the tyrosine kinase superfamily include, but are not limited to, FGF receptors and their various isoforms such as FGFR1, FGFR2, FGFR3, FGFR4, and FGFR5.

[0445] In an embodiment, the additional modified signaling agent is interferon α. In such embodiments, the modified IFNα agent has reduced affinity and/or activity for the IFN-α/β receptor (IFNAR), i.e., IFNAR1 and/or IFNAR2 chains. In some embodiments, the modified IFN-α agent has substantially reduced or ablated affinity and/or activity for the IFN-α/β receptor (IFNAR), i.e., IFNAR1 and/or IFNAR2 chains.

[0446] Mutant forms of interferon α are known to the person skilled in the art. In an illustrative embodiment, the modified signaling agent is the allelic form IFNα2a, having the amino acid sequence of SEQ ID NO:233.

[0447] In an illustrative embodiment, the modified signaling agent is the allelic form IFNα2b having the amino acid sequence of SEQ ID NO: 234 (which differs from IFNα2a at amino acid position 23).

[0448] In some embodiments, said IFNα2 mutant (IFNα2a or IFNα2b) is mutated at one or more amino acids at positions 144-154, such as amino acid positions 145, 148, 149 and/or 153. In some embodiments, the IFNα2 mutant comprises one or more mutations selected from A145G, L153A, R149A, and M148A. Such mutants are described, for example, in WO2013/107791 and Piehler et al., (2000) J. Biol. Chem, 275:40425-33, the entire contents of all of which are hereby incorporated by reference.

[0449] In some embodiments, the IFNα2 mutants have reduced affinity and/or activity for IFNAR1. In some embodiments, the IFNα2 mutant comprises one or more mutations selected from F64A, N65A, T69A, L80A, Y85A, and Y89A, as described in WO2010/030671, the entire contents of which is hereby incorporated by reference.

[0450] In some embodiments, the IFNα2 mutant comprises one or more mutations selected from K133A, R144A, R149A, and L153A as described in WO2008/124086, the entire contents of which is hereby incorporated by reference.

[0451] In some embodiments, the IFNα2 mutant comprises one or more mutations selected from R120E and R120E/K121E, as described in WO2015/007520 and WO2010/030671, the entire contents of which are hereby incorporated by reference. In such embodiments, said IFNα2 mutant antagonizes wildtype IFNα2 activity. In such embodiments, said mutant IFNα2 has reduced affinity and/or activity for IFNAR1 while affinity and/or activity of IFNR2 is retained.

[0452] In some embodiments, the human IFNα2 mutant comprises (1) one or more mutations selected from R120E and R120E/K121E, which, without wishing to be bound by theory, create an antagonistic effect and (2) one or more mutations selected from K133A, R144A, R149A, and L153A, which, without wishing to be bound by theory, allow for an attenuated effect at, for example, IFNAR2. In an embodiment, the human IFNα2 mutant comprises R120E and L153A.

[0453] In some embodiments, the human IFNα2 mutant comprises one or more mutations selected from, L15A, A19W, R22A, R23A, L26A, F27A, L30A, L30V, K31A, D32A, R33K, R33A, R33Q, H34A, D35A, Q40A, D114R, L117A, R120A, R125A, K134A, R144A, A145G, A145M, M148A, R149A, S152A, L153A, and N156A as disclosed in WO 2013/059885, the entire disclosures of which are hereby incorporated by reference. In some embodiments, the human IFNα2 mutant comprises the mutations H57Y, E58N, Q61S, and/or L30A as disclosed in WO 2013/059885. In some embodiments, the human IFN-α2 mutant comprises the mutations H57Y, E58N, Q61S, and/or R33A as disclosed in WO 2013/059885. In some embodiments, the human IFNα2 mutant comprises the mutations H57Y, E58N, Q61S, and/or M148A as disclosed in WO 2013/059885. In some embodiments, the human IFNα2 mutant comprises the mutations H57Y, E58N, Q61S, and/or L153A as disclosed in WO 2013/059885. In some embodiments, the human IFNα2 mutant comprises the mutations N65A, L80A, Y85A, and/or Y89A as disclosed in WO 2013/059885. In some embodiments, the human IFNα2 mutant comprises the mutations N65A, L80A, Y85A, Y89A, and/or D114A as disclosed in WO 2013/059885. In some embodiments, the human IFNα2 mutant comprises one or more mutations selected from R144X₁, A145X₂, and R33A, wherein X₁ is selected from A, S, T, Y, L, and I, and wherein X₂ is selected from G, H, Y, K, and D. In some embodiments, the human IFNα2 mutant comprises one or more mutations selected from R33A, T106X₃, R120E, R144X₁ A145X₂, M148A, R149A, and L153A with respect to amino acid sequence of SEQ ID NO: 233 or 234, wherein X₁ is selected from A, S, T, Y, L, and I, wherein X₂ is selected from G, H, Y, K, and D, and wherein X₃ is selected from A and E.

[0454] In some embodiments, the additional modified signaling agent is IFNα1. In such embodiments, the modified IFNα 1 signaling agent also has reduced affinity and/or activity for the IFN-α/β receptor (IFNAR), i.e., IFNAR1 and/or IFNAR2 chains. In some embodiments, the modified IFNα1 agent has substantially reduced or ablated affinity and/or activity for the IFN-α/β receptor (IFNAR), i.e., IFNAR1 and/or IFNAR2 chains.

[0455] In some embodiments, the additional modified IFNα1 signaling agent is modified to have a mutation at one or more amino acids at positions L15, A19, R23, S25, L30, D32, R33, H34, Q40, D115, L118, K121, R126, E133, K134, K135, R145, A146, M149, R150, S153, L154, and N157 with reference to SEQ ID NO: 450. The mutations can optionally be a hydrophobic mutation and can be, e.g., selected from alanine, valine, leucine, and isoleucine. In some embodiments, the IFNα1 interferon is modified to have a one or more mutations selected from L15A, A19W, R23A, S25A, L30A, L30V, D32A, R33K, R33A, R33Q, H34A, Q40A, D115R, L118A, K121A, K121E, R126A, R126E, E133A, K134A, K135A, R145A, R145D, R145E, R145G, R145H, R1451, R145K, R145L, R145N, R145Q, R145S, R145T, R145V, R145Y, A146D, A146E, A146G, A146H, A1461, A146K, A146L, A146M, A146N, A146Q, A146R, A146S, A146T, A146V, A146Y, M149A, M149V, R150A, S153A, L154A, and N157A with reference to SEQ ID NO: 450. In some embodiments, the IFNα1 mutant comprises one or more multiple mutations selected from L30A/H58Y/E59N/Q62S, R33A/H58Y/E59N/Q62S, M149A/H58Y/E59N/Q62S, L154A/H58Y/E59N/Q62S, R145A/H58Y/E59N/Q62S, D115A/R121A, L118A/R121A, L118A/R121A/K122A, R121A/K122A, and R121E/K 122E with reference to SEQ ID NO: 450.

[0456] In an embodiment, the additional modified IFNα1 signaling agent, or variant thereof, is modified to have one or more mutations at amino acid positions C1, C29, C86, C99, or C139 with reference to SEQ ID NO: 450. In this regard, Beilharz et al., Journal of interferon research 6.6 (1986): 677-685 (which is hereby incorporated by reference in its entirety) describes various mutations of IFNα1 that may be used introduced in the modified IFNα1 of the present invention. The mutation at position C86 can be, e.g., C86S or C86A or C86Y. These C86 mutants of IFNα1 are called reduced cysteine-based aggregation mutants. In some embodiment, the IFNα1 variant includes mutations at positions C1, C86 and C99 with reference to SEQ ID NO: 450.

[0457] In an embodiment, the additional modified signaling agent is interferon β. In such embodiments, the modified interferon β agent also has reduced affinity and/or activity for the IFN-α/β receptor (IFNAR), i.e., IFNAR1 and/or IFNAR2 chains. In some embodiments, the modified interferon β agent has substantially reduced or ablated affinity and/or activity for the IFN-α/β receptor (IFNAR), i.e., IFNAR1 and/or IFNAR2 chains.

[0458] In an illustrative embodiment, the modified additional signaling agent is IFNβ. In various embodiments, the IFNβ encompasses functional derivatives, analogs, precursors, isoforms, splice variants, or fragments of IFNβ. In various embodiments, the IFNβ encompasses IFNβ derived from any species. In an embodiment, the chimeric proteins or chimeric protein complexes such as Fc-based chimeric protein complex comprises a modified version of mouse IFNβ. In another embodiment, the chimeric proteins or chimeric protein complexes such as Fc-based chimeric protein complex comprises a modified version of human IFNβ. Human IFNβ is a polypeptide with a molecular weight of about 22 kDa comprising 166 amino acid residues. The amino acid sequence of human IFNβ is SEQ ID NO: 277.

[0459] In some embodiments, the human IFNβ is IFNβ-1a which is a glycosylated form of human IFNβ. In some embodiments, the human IFNβ is IFNβ-1b which is a non-glycosylated form of human IFNβ that has a Met-1 deletion and a Cys-17 to Ser mutation.

[0460] In various embodiments, the modified IFNβ has one or more mutations that reduce its binding to or its affinity for the IFNAR1 subunit of IFNAR. In one embodiment, the modified IFNβ has reduced affinity and/or activity at IFNAR1. In various embodiments, the modified IFNβ is human IFNβ and has one or more mutations at positions F67, R71, L88, Y92, 195, N96, K123, and R124. In some embodiments, the one or more mutations are substitutions selected from F67G, F67S, R71A, L88G, L88S, Y92G, Y92S, 195A, N96G, K123G, and R124G. In an embodiment, the modified IFNβ comprises the F67G mutation. In an embodiment, the modified IFNβ comprises the K123G mutation. In an embodiment, the modified IFNβ comprises the F67G and R71A mutations. In an embodiment, the modified IFNβ comprises the L88G and Y92G mutations. In an embodiment, the modified IFNβ comprises the Y92G, 195A, and N96G mutations. In an embodiment, the modified IFNβ comprises the K123G and R124G mutations. In an embodiment, the modified IFNβ comprises the F67G, L88G, and Y92G mutations. In an embodiment, the modified IFNβ comprises the F67S, L88S, and Y92S mutations.

[0461] In some embodiments, the modified IFNβ has one or more mutations that reduce its binding to or its affinity for the IFNAR2 subunit of IFNAR. In one embodiment, the modified IFNβ has reduced affinity and/or activity at IFNAR2. In various embodiments, the modified IFNβ is human IFNβ and has one or more mutations at positions W22, R27, L32, R35, V148, L151, R152, and Y155. In some embodiments, the one or more mutations are substitutions selected from W22G, R27G, L32A, L32G, R35A, R35G, V148G, L151G, R152A, R152G, and Y155G. In an embodiment, the modified IFNβ comprises the W22G mutation. In an embodiment, the modified IFNβ comprises the L32A mutation. In an embodiment, the modified IFNβ comprises the L32G mutation. In an embodiment, the modified IFNβ comprises the R35A mutation. In an embodiment, the modified IFNβ comprises the R35G mutation.

[0462] In an embodiment, the modified IFNβ comprises the V148G mutation. In an embodiment, the modified IFNβ comprises the R152A mutation. In an embodiment, the modified IFNβ comprises the R152G mutation. In an embodiment, the modified IFNβ comprises the Y155G mutation. In an embodiment, the modified IFNβ comprises the W22G and R27G mutations. In an embodiment, the modified IFNβ comprises the L32A and R35A mutation. In an embodiment, the modified IFNβ comprises the L151G and R152A mutations. In an embodiment, the modified

[0463] IFNβ comprises the V148G and R152A mutations.

[0464] In some embodiments, the modified IFNβ has one or more of the following mutations: R35A, R35T, E42K, M62I, G78S, A141Y. A142T. E149K, and R152H. In some embodiments, the modified IFNβ has one or more of the following mutations: R35A, R35T, E42K, M62I, G78S, A141Y, A142T, E149K, and R152H in combination with C173 or C17A.

[0465] In some embodiments, the modified IFNβ has one or more of the following mutations: R35A, R35T, E42K, M62I, G78S, A141Y, A142T, E149K, and R152H in combination with any of the other IFNβ mutations described herein.

[0466] The crystal structure of human IFNβ is known and is described in Karpusas et al., (1998) PNAS, 94(22): 11813-11818. Specifically, the structure of human IFNβ has been shown to include five α-helices (i.e., A, B, C, D, and E) and four loop regions that connect these helices (i.e., AB, BC, CD, and DE loops). In various embodiments, the modified IFNβ has one or more mutations in the A, B, C, D, E helices and/or the AB, BC, CD, and DE loops which reduce its binding affinity or activity at a therapeutic receptor such as IFNAR. Illustrative mutations are described in WO2000/023114 and US20150011732, the entire contents of which are hereby incorporated by reference. In an illustrative embodiment, the modified IFNβ is human IFNβ comprising alanine substitutions at amino acid positions 15, 16, 18, 19, 22, and/or 23. In an illustrative embodiment, the modified IFNβ is human IFNβ comprising alanine substitutions at amino acid positions 28-30, 32, and 33. In an illustrative embodiment, the modified IFNβ is human IFNβ comprising alanine substitutions at amino acid positions 36, 37, 39, and 42. In an illustrative embodiment, the modified IFNβ is human IFNβ comprising alanine substitutions at amino acid positions 64 and 67 and a serine substitution at position 68. In an illustrative embodiment, the modified IFNβ is human IFNβ comprising alanine substitutions at amino acid positions 71-73. In an illustrative embodiment, the modified IFNβ is human IFNβ comprising alanine substitutions at amino acid positions 92, 96, 99, and 100. In an illustrative embodiment, the modified IFNβ is human IFNβ comprising alanine substitutions at amino acid positions 128, 130, 131, and 134. In an illustrative embodiment, the modified IFNβ is human IFNβ comprising alanine substitutions at amino acid positions 149, 153, 156, and 159. In some embodiments, the mutant IFNβ comprises SEQ ID NO:277 and a mutation at W22, the mutation being an aliphatic hydrophobic residue selected from glycine (G), alanine (A), leucine (L), isoleucine (I), methionine (M), and valine (V).

[0467] In some embodiments, the mutant IFNβ comprises SEQ ID NO:277 and a mutation at R27, the mutation being an aliphatic hydrophobic residue selected from glycine (G), alanine (A), leucine (L), isoleucine (I), methionine (M), and valine (V).

[0468] In some embodiments, the mutant IFNβ comprises SEQ ID NO:277 and a mutation at W22, the mutation being an aliphatic hydrophobic residue selected from glycine (G), alanine (A), leucine (L), isoleucine (I), methionine (M), and valine (V) and a mutation at R27, the mutation being an aliphatic hydrophobic residue selected from glycine (G), alanine (A), leucine (L), isoleucine (I), methionine (M), and valine (V).

[0469] In some embodiments, the mutant IFNβ comprises SEQ ID NO:277 and a mutation at L32, the mutation being an aliphatic hydrophobic residue selected from glycine (G), alanine (A), isoleucine (I), methionine (M), and valine (V).

[0470] In some embodiments, the mutant IFNβ comprises SEQ ID NO:277 and a mutation at R35, the mutation being an aliphatic hydrophobic residue selected from glycine (G), alanine (A), leucine (L), isoleucine (I), methionine (M), and valine (V).

[0471] In some embodiments, the mutant IFNβ comprises SEQ ID NO:277 and a mutation at L32, the mutation being an aliphatic hydrophobic residue selected from glycine (G), alanine (A), isoleucine (I), methionine (M), and valine (V) and a mutation at R35, the mutation being an aliphatic hydrophobic residue selected from glycine (G), alanine (A), leucine (L), isoleucine (I), methionine (M), and valine (V).

[0472] In some embodiments, the mutant IFNβ comprises SEQ ID NO:277 and a mutation at F67, the mutation being an aliphatic hydrophobic residue selected from glycine (G), alanine (A), leucine (L), isoleucine (I), methionine (M), and valine (V).

[0473] In some embodiments, the mutant IFNβ comprises SEQ ID NO:277 and a mutation at R71, the mutation being an aliphatic hydrophobic residue selected from glycine (G), alanine (A), leucine (L), isoleucine (I), methionine (M), and valine (V).

[0474] In some embodiments, the mutant IFNβ comprises SEQ ID NO:277 and a mutation at F67, the mutation being an aliphatic hydrophobic residue selected from glycine (G), alanine (A), leucine (L), isoleucine (I), methionine (M), and valine (V) and a mutation at R71, the mutation being an aliphatic hydrophobic residue selected from glycine (G), alanine (A), leucine (L), isoleucine (I), methionine (M), and valine (V).

[0475] In some embodiments, the mutant IFNβ comprises SEQ ID NO:277 and a mutation at L88, the mutation being an aliphatic hydrophobic residue selected from glycine (G), alanine (A), isoleucine (I), methionine (M), and valine (V).

[0476] In some embodiments, the mutant IFNβ comprises SEQ ID NO:277 and a mutation at Y92, the mutation being an aliphatic hydrophobic residue selected from glycine (G), alanine (A), leucine (L), isoleucine (I), methionine (M), and valine (V).

[0477] In some embodiments, the mutant IFNβ comprises SEQ ID NO:277 and a mutation at F67, the mutation being an aliphatic hydrophobic residue selected from glycine (G), alanine (A), leucine (L), isoleucine (I), methionine (M), and valine (V) and a mutation at L88, the mutation being an aliphatic hydrophobic residue selected from glycine (G), alanine (A), isoleucine (I), methionine (M), and valine (V) and a mutation at Y92, the mutation being an aliphatic hydrophobic residue selected from glycine (G), alanine (A), leucine (L), isoleucine (I), methionine (M), and valine (V).

[0478] In some embodiments, the mutant IFNβ comprises SEQ ID NO:277 and a mutation at L88, the mutation being an aliphatic hydrophobic residue selected from glycine (G), alanine (A), isoleucine (I), methionine (M), and valine (V) and a mutation at Y92, the mutation being an aliphatic hydrophobic residue selected from glycine (G), alanine (A), leucine (L), isoleucine (I), methionine (M), and valine (V).

[0479] In some embodiments, the mutant IFNβ comprises SEQ ID NO:277 and a mutation at 195, the mutation being an aliphatic hydrophobic residue selected from glycine (G), alanine (A), leucine (L), methionine (M), and valine (V) and a mutation at Y92, the mutation being an aliphatic hydrophobic residue selected from glycine (G), alanine (A), leucine (L), isoleucine (I), methionine (M), and valine (V).

[0480] In some embodiments, the mutant IFNβ comprises SEQ ID NO:277 and a mutation at N96, the mutation being an aliphatic hydrophobic residue selected from glycine (G), alanine (A), leucine (L), isoleucine (I), methionine (M), and valine (V) and a mutation at Y92, the mutation being an aliphatic hydrophobic residue selected from glycine (G), alanine (A), leucine (L), isoleucine (I), methionine (M), and valine (V).

[0481] In some embodiments, the mutant IFNβ comprises SEQ ID NO: 277 and a mutation at Y92, the mutation being an aliphatic hydrophobic residue selected from glycine (G), alanine (A), leucine (L), isoleucine (I), methionine (M), and valine (V) and a mutation at 195, the mutation being an aliphatic hydrophobic residue selected from glycine (G), alanine (A), leucine (L), methionine (M), and valine (V) and a mutation at N96, the mutation being an aliphatic hydrophobic residue selected from glycine (G), alanine (A), leucine (L), isoleucine (I), methionine (M), and valine (V).

[0482] In some embodiments, the mutant IFNβ comprises SEQ ID NO: 277 and a mutation at K123, the mutation being an aliphatic hydrophobic residue selected from glycine (G), alanine (A), leucine (L), isoleucine (I), methionine (M), and valine (V).

[0483] In some embodiments, the mutant IFNβ comprises SEQ ID NO: 277 and a mutation at R124, the mutation being an aliphatic hydrophobic residue selected from glycine (G), alanine (A), leucine (L), isoleucine (I), methionine (M), and valine (V).

[0484] In some embodiments, the mutant IFNβ comprises SEQ ID NO: 277 and a mutation at K123, the mutation being an aliphatic hydrophobic residue selected from glycine (G), alanine (A), leucine (L), isoleucine (I), methionine (M), and valine (V) and a mutation at R124, the mutation being an aliphatic hydrophobic residue selected from glycine (G), alanine (A), leucine (L), isoleucine (I), methionine (M), and valine (V).

[0485] In some embodiments, the mutant IFNβ comprises SEQ ID NO: 277 and a mutation at L151, the mutation being an aliphatic hydrophobic residue selected from glycine (G), alanine (A), isoleucine (I), methionine (M), and valine (V).

[0486] In some embodiments, the mutant IFNβ comprises SEQ ID NO: 277 and a mutation at R152, the mutation being an aliphatic hydrophobic residue selected from glycine (G), alanine (A), leucine (L), isoleucine (I), methionine (M), and valine (V).

[0487] In some embodiments, the mutant IFNβ comprises SEQ ID NO: 277 and a mutation at L151, the mutation being an aliphatic hydrophobic residue selected from glycine (G), alanine (A), isoleucine (I), methionine (M), and valine (V) and a mutation at R152, the mutation being an aliphatic hydrophobic residue selected from glycine (G), alanine (A), leucine (L), isoleucine (I), methionine (M), and valine (V).

[0488] In some embodiments, the mutant IFNβ comprises SEQ ID NO: 277 and a mutation at V148, the mutation being an aliphatic hydrophobic residue selected from glycine (G), alanine (A), leucine (L), isoleucine (I), and methionine (M).

[0489] In some embodiments, the mutant IFNβ comprises SEQ ID NO: 277 and a mutation at V148, the mutation being an aliphatic hydrophobic residue selected from glycine (G), alanine (A), leucine (L), isoleucine (I), methionine (M), and valine (V) and a mutation at R152, the mutation being an aliphatic hydrophobic residue selected from glycine (G), alanine (A), leucine (L), isoleucine (I), methionine (M), and valine (V).

[0490] In some embodiments, the mutant IFNβ comprises SEQ ID NO: 277 and a mutation at Y155, the mutation being an aliphatic hydrophobic residue selected from glycine (G), alanine (A), leucine (L), isoleucine (I), methionine (M), and valine (V).

[0491] In some embodiments, the present invention relates to a chimeric proteins or chimeric protein complexes such as Fc-based chimeric protein complex comprising: (a) a modified IFNβ, having the amino acid sequence of SEQ ID NO: 277 and a mutation at position W22, wherein the mutation is an aliphatic hydrophobic residue and a modified IL-2 or modified IL-2 variant disclosed here; and (b) one or more targeting moieties, said targeting moieties comprising recognition domains which specifically bind to antigens or receptors of interest, the modified IFNβ and the one or more targeting moieties are optionally connected with one or more linkers. In various embodiments the mutation at position W22 is aliphatic hydrophobic residue is selected from G, A, L, I, M, and V. In various embodiments the mutation at position W22 is G.

[0492] Additional illustrative IFNβ mutants are provided in PCT/EP2017/061544, the entire disclosure of which is incorporated by reference herein.

[0493] In some embodiments, the modified additional signaling agent is interferon γ. In such embodiments, the modified interferon γ agent has reduced affinity and/or activity for the interferon-gamma receptor (IFNGR), i.e., IFNGR1 and IFNGR2 chains. In some embodiments, the modified interferon γ agent has substantially reduced or ablated affinity and/or activity for the interferon-gamma receptor (IFNGR), i.e., IFNGR1 and/or IFNGR2 chains.

[0494] In some embodiments, the modified additional signaling agent is a consensus interferon. The consensus interferon is generated by scanning the sequences of several human non-allelic IFNα subtypes and assigning the most frequently observed amino acid in each corresponding position. The consensus interferon differs from IFNα2b at out of 166 amino acids (88% homology), and comparison with IFNβ shows identity at over 30% of the amino acid positions. In various embodiments, the consensus interferon comprises the following amino acid sequence of SEQ ID NO: 278.

[0495] In some embodiments, the consensus interferon comprises the amino acid sequence of SEQ ID NO: 279, which differs from the amino acid sequence of SEQ ID NO: 278 by one amino acid, i.e., SEQ ID NO: 279 lacks the initial methionine residue of SEQ ID NO: 278:

[0496] In various embodiments, the consensus interferon comprises a modified version of the consensus interferon, i.e., a consensus interferon variant, as a signaling agent. In various embodiments, the consensus interferon variant encompasses functional derivatives, analogs, precursors, isoforms, splice variants, or fragments of the consensus interferon.

[0497] In an embodiment, the consensus interferon variants are selected form the consensus interferon variants disclosed in U.S. Pat. Nos. 4,695,623, 4,897,471, 5,541,293, and 8,496,921, the entire contents of all of which are hereby incorporated by reference. For example, the consensus interferon variant may comprise the amino acid sequence of IFN-CON₂ or IFN-CON₃ as disclosed in U.S. Pat. Nos. 4,695,623, 4,897,471, and 5,541,293. In an embodiment, the consensus interferon variant comprises the amino acid sequence of IFN-CON₂: SEQ ID NO: 280.

[0498] In an embodiment, the consensus interferon variant comprises the amino acid sequence of IFN-CON₃: SEQ ID NO: 281.

[0499] In an embodiment, the consensus interferon variant comprises the amino acid sequence of any one of the variants disclosed in U.S. Pat. No. 8,496,921. For example, the consensus variant may comprise the amino acid sequence of: SEQ ID NO: 282.

[0500] In another embodiment, the consensus interferon variant may comprise the amino acid sequence of: SEQ ID NO: 283.

[0501] In some embodiments, the consensus interferon variant may be PEGylated, i.e., comprises a PEG moiety. In an embodiment, the consensus interferon variant may comprise a PEG moiety attached at the S156C position of SEQ ID NO: 283.

[0502] In some embodiments, the engineered interferon is a variant of human IFNα2a, with an insertion of Asp at approximately position 41 in the sequence Glu-Glu-Phe-Gly-Asn-Gln (SEQ ID NO: 284) to yield Glu-Glu-Phe-Asp-Gly-Asn-Gln (SEQ ID NO: 285) (which resulted in a renumbering of the sequence relative to IFNα2a sequence) and the following mutations of Arg23Lys, Leu26Pro, Glu53GIn, Thr54Ala, Pro56Ser, Asp86Glu, Ile104Thr, Glyl06Glu, Thr110Glu, Lys117Asn, Arg125Lys, and Lys136Thr. All embodiments herein that describe consensus interferons apply equally to this engineered interferon

[0503] In some embodiments, the additional modified signaling agent is vascular endothelial growth factor (VEGF). VEGF is a potent growth factor that plays major roles in physiological but also pathological angiogenesis, regulates vascular permeability and can act as a growth factor on cells expressing VEGF receptors. Additional functions include, among others, stimulation of cell migration in macrophage lineage and endothelial cells. Several members of the VEGF family of growth factors exist, as well as at least three receptors (VEGFR-1, VEGFR-2, and VEGFR-3). Members of the VEGF family can bind and activate more than one VEGFR type. For example, VEGF-A binds VEGFR-1 and -2, while VEGF-C can bind VEGFR-2 and -3. VEGFR-1 and VEGFR-2 activation regulate angiogenesis while VEGFR-3 activation is associated with lymphangiogenesis. The major pro-angiogenic signal is generated from activation of VEGFR-2. VEGFR-1 activation has been reported to be possibly associated with negative role in angiogenesis. It has also been reported that VEGFR-1 signaling is important for progression of tumors in vivo via bone marrow-derived VEGFR-1 positive cells (contributing to formation of premetastatic niche in the bone). Several therapies based on VEGF-A directed/neutralizing therapeutic antibodies have been developed, primarily for use in treatment of various human tumors relying on angiogenesis. These are not without side effects though. This may not be surprising considering that these operate as general, non-cell/tissue specific VEGF/VEGFR interaction inhibitors. Hence, it would be desirable to restrict VEGF (e.g. VEGF-A)/EGFR-2 inhibition to specific target cells (e.g. tumor vasculature endothelial cells).

[0504] In some embodiments, the VEGF is VEGF-A, VEGF-B, VEFG-C, VEGF-D, or VEGF-E and isoforms thereof including the various isoforms of VEGF-A such as VEGF 121, VEGF 121b, VEGF 145, VEGF 165, VEGF 165b, VEGF 189, and VEGF206. In some embodiments, the modified signaling agent has reduced affinity and/or activity for VEGFR-1 (Flt-1) and/or VEGFR-2 (KDR/Flk-1). In some embodiments, the modified signaling agent has substantially reduced or ablated affinity and/or activity for VEGFR-1 (Flt-1) and/or VEGFR-2 (KDR/Flk-1). In an embodiment, the modified signaling agent has reduced affinity and/or activity for VEGFR-2 (KDR/Flk-1) and/or substantially reduced or ablated affinity and/or activity for VEGFR-1 (Flt-1). Such an embodiment finds use, for example, in wound healing methods or treatment of ischmia-related diseases (without wishing to be bound by theory, mediated by VEGFR-2's effects on endothelial cell function and angiogenesis). In various embodiments, binding to VEGFR-1 (Flt-1), which is linked to cancers and pro-inflammatory activities, is avoided. In various embodiments, VEGFR-1 (Flt-1) acts a decoy receptor and therefore substantially reduces or ablates affinity at this receptor avoids sequestration of the therapeutic agent. In an embodiment, the modified signaling agent has substantially reduced or ablated affinity and/or activity for VEGFR-1 (Flt-1) and/or substantially reduced or ablated affinity and/or activity for VEGFR-2 (KDR/Flk-1). In some embodiments, the VEGF is VEGF-C or VEGF-D. In such embodiments, the modified signaling agent has reduced affinity and/or activity for VEGFR-3. Alternatively, the modified signaling agent has substantially reduced or ablated affinity and/or activity for VEGFR-3.

[0505] Proangiogenic therapies are also important in various diseases (e.g. ischemic heart disease, bleeding etc.), and include VEGF-based therapeutics. Activation of VEGFR-2 is proangiogenic (acting on endothelial cells). Activation of VEFGR-1 can cause stimulation of migration of inflammatory cells (including, for example, macrophages) and lead to inflammation associated hypervascular permeability. Activation of VEFGR-1 can also promote bone marrow associated tumor niche formation. Thus, VEGF based therapeutic selective for VEGFR-2 activation would be desirable in this case. In addition, cell specific targeting, e.g. to endothelial cells, would be desirable.

[0506] In some embodiments, the additional modified signaling agent has reduced affinity and/or activity (e.g. antagonistic) for VEGFR-2 and/or has substantially reduced or ablated affinity and/or activity for VEGFR-1. When targeted to tumor vasculature endothelial cells via a targeting moiety that binds to a tumor endothelial cell marker (e.g. PSMA and others), such construct inhibits VEGFR-2 activation specifically on such marker-positive cells, while not activating VEGFR-1 en route and on target cells (if activity ablated), thus eliminating induction of inflammatory responses, for example. This would provide a more selective and safe anti-angiogenic therapy for many tumor types as compared to VEGF-A neutralizing therapies.

[0507] In some embodiments, the additional modified signaling agent has reduced affinity and/or activity (e.g. agonistic) for VEGFR-2 and/or has substantially reduced or ablated affinity and/or activity for VEGFR-1. Through targeting to vascular endothelial cells, such construct, in some embodiments, promotes angiogenesis without causing VEGFR-1 associated induction of inflammatory responses. Hence, such a construct would have targeted proangiogenic effects with substantially reduced risk of side effects caused by systemic activation of VEGFR-2 as well as VEGR-1.

[0508] In an illustrative embodiment, the modified signaling agent is VEGF 165, which has the amino acid sequence of SEQ ID NO:235.

[0509] In another illustrative embodiment, the additional modified signaling agent is VEGF 165b, which has the amino acid sequence of SEQ ID NO:236.

[0510] In these embodiments, the modified signaling agent has a mutation at amino acid I83 (e.g., a substitution mutation at I83, e.g., I83K, I83R, or I83H). Without wishing to be bound by theory, it is believed that such mutations may result in reduced receptor binding affinity. See, for example, U.S. Pat. No. 9,078,860, the entire contents of which are hereby incorporated by reference.

[0511] In an embodiment, the additional modified signaling agent is TNFα. TNF is a pleiotropic cytokine with many diverse functions, including regulation of cell growth, differentiation, apoptosis, tumorigenesis, viral replication, autoimmunity, immune cell functions and trafficking, inflammation, and septic shock. It binds to two distinct membrane receptors on target cells: TNFR1 (p55) and TNFR2 (p75). TNFR1 exhibits a very broad expression pattern whereas TNFR2 is expressed preferentially on certain populations of lymphocytes, Tregs, endothelial cells, certain neurons, microglia, cardiac myocytes and mesenchymal stem cells. Very distinct biological pathways are activated in response to receptor activation, although there is also some overlap. As a general rule, without wishing to be bound by theory, TNFR1 signaling is associated with induction of apoptosis (cell death) and TNFR2 signaling is associated with activation of cell survival signals (e.g. activation of NFκB pathway). Administration of TNF is systemically toxic, and this is largely due to TNFR1 engagement. However, it should be noted that activation of TNFR2 is also associated with a broad range of activities and, as with TNFR1, in the context of developing TNF based therapeutics, control over TNF targeting and activity is important.

[0512] In some embodiments, the additional modified signaling agent has reduced affinity and/or activity for TNFR1 and/or TNFR2. In some embodiments, the modified signaling agent has substantially reduced or ablated affinity and/or activity for TNFR1 and/or TNFR2. TNFR1 is expressed in most tissues, and is involved in cell death signaling while, by contrast, TNFR2 is involved in cell survival signaling. Accordingly, in embodiments directed to methods of treating cancer, the modified signaling agent has reduced affinity and/or activity for TNFR1 and/or substantially reduced or ablated affinity and/or activity for TNFR2. In these embodiments, the chimeric proteins or chimeric protein complexes such as Fc-based chimeric protein complex may be targeted to a cell for which apoptosis is desired, e.g. a tumor cell or a tumor vasculature endothelial cell. In embodiments directed to methods of promoting cell survival, for example, in neurogenesis for the treatment of neurodegenerative disorders, the modified signaling agent has reduced affinity and/or activity for TNFR2 and/or substantially reduced or ablated affinity and/or activity for TNFR1. Stated another way, the present chimeric proteins or chimeric protein complexes such as Fc-based chimeric protein complex, in some embodiments, comprise modified TNF-α agent that allows of favoring either death or survival signals.

[0513] In some embodiments, the chimeric proteins or chimeric protein complexes such as Fc-based chimeric protein complex has a modified TNF having reduced affinity and/or activity for TNFR1 and/or substantially reduced or ablated affinity and/or activity for TNFR2. Such a chimera, in some embodiments, is a more potent inducer of apoptosis as compared to a wild type TNF and/or a chimera bearing only mutation(s) causing reduced affinity and/or activity for TNFR1. Such a chimera, in some embodiments, finds use in inducing tumor cell death or a tumor vasculature endothelial cell death (e.g. in the treatment of cancers). Also, in some embodiments, these chimeras avoid or reduce activation of Treg cells via TNFR2, for example, thus further supporting TNFR1-mediated antitumor activity in vivo.

[0514] In some embodiments, the chimeric proteins or chimeric protein complexes such as Fc-based chimeric protein complex has a modified TNF having reduced affinity and/or activity for TNFR2 and/or substantially reduced or ablated affinity and/or activity for TNFR1. Such a chimera, in some embodiments, is a more potent activator of cell survival in some cell types, which may be a specific therapeutic objective in various disease settings, including without limitation, stimulation of neurogenesis. In addition, a TNFR2-favoring chimera is also useful in the treatment of autoimmune diseases (e.g. Crohn's, diabetes, MS, colitis etc. and many others described herein). In some embodiments, the chimera is targeted to auto-reactive T cells. In some embodiments, the chimera promotes Treg cell activation and indirect suppression of cytotoxic T cells.

[0515] In some embodiments, the chimera causes the death of auto-reactive T cells, e.g. by activation of TNFR2 and/or avoidance of TNFR1 (e.g. a modified TNF having reduced affinity and/or activity for TNFR2 and/or substantially reduced or ablated affinity and/or activity for TNFR1). Without wishing to be bound by theory these auto-reactive T cells, have their apoptosis/survival signals altered e.g. by NFκB pathway activity/signaling alterations. In some embodiments, a TNFR2 based chimera has additional therapeutic applications in diseases, including various autoimmune diseases, heart disease, de-myelinating and neurodegenerative disorders, and infectious disease, among others.

[0516] In an embodiment, the wild type TNFα has the amino acid sequence of SEQ ID NO:237.

[0517] In such embodiments, the modified TNFα agent has mutations at one or more amino acid positions 29, 31, 32, 84, 85, 86, 87, 88, 89, 145, 146 and 147 which produces a modified TNFα with reduced receptor binding affinity. See, for example, U.S. Pat. No. 7,993,636, the entire contents of which are hereby incorporated by reference.

[0518] In some embodiments, the modified human TNFα moiety has mutations at one or more amino acid positions R32, N34, Q67, H73, L75, T77, S86, Y87, V91, 197, T105, P106, A109, P113, Y115, E127, N137, D143, and A145, as described, for example, in WO/2015/007903, the entire contents of which is hereby incorporated by reference (numbering according to the human TNF sequence, Genbank accession number BAG70306, version BAG70306.1 GI: 197692685). In some embodiments, the modified human TNFα moiety has substitution mutations selected from R32G, N34G, Q67G, H73G, L75G, L75A, L75S, T77A, S86G, Y87Q, Y87L, Y87A, Y87F, V91G, V91A, 197A, 197Q, 197S, T105G, P106G, A109Y, P113G, Y115G, Y115A, E127G, N137G, D143N, A145G and A145T. In an embodiment, the human TNFα moiety has a mutation selected from Y87Q, Y87L, Y87A, and Y87F. In another embodiment, the human TNFα moiety has a mutation selected from 197A, 197Q, and 197S. In a further embodiment, the human TNFα moiety has a mutation selected from Y115A and Y115G.

[0519] In some embodiments, the modified TNFα agent has one or more mutations selected from N39Y, S147Y, and Y87H, as described in WO2008/124086, the entire contents of which is hereby incorporated by reference.

[0520] In an embodiment, the additional modified signaling agent is TNFβ. TNFβ can form a homotrimer or a heterotrimer with LT-β (LT-α1β2). In some embodiments, the modified signaling agent has substantially reduced or ablated affinity and/or activity for TNFR1 and/or TNFR2 and/or herpes virus entry mediator (HEVM) and/or LT-BR.

[0521] In an embodiment, the wild type TNFβ has the amino acid sequence of SEQ ID NO:238.

[0522] In such embodiments, the modified TNFβ agent may comprise mutations at one or more amino acids at positions 106-113, which produce a modified TNFβ with reduced receptor binding affinity to TNFR2. In an embodiment, the modified signaling agent has one or more substitution mutations at amino acid positions 106-113. In illustrative embodiments, the substitution mutations are selected from Q107E, Q107D, S106E, S106D, Q107R, Q107N, Q107E/S106E, Q107E/S106D, Q107D/S106E, and Q107D/S 106D. In another embodiment, the modified signaling agent has an insertion of about 1 to about 3 amino acids at positions 106-113.

[0523] In some embodiments, the additional modified agent is a TNF family member (e.g. TNF-alpha, TNF-beta) which can be a single chain trimeric version as described in WO 2015/007903, the entire contents of which are incorporated by reference.

[0524] In some embodiments, the modified agent is a TNF family member (e.g. TNF-alpha, TNF-beta) which has reduced affinity and/or activity, i.e. antagonistic activity (e.g. natural antagonistic activity or antagonistic activity that is the result of one or more mutations, see, e.g., WO 2015/007520, the entire contents of which are hereby incorporated by reference) at TNFR1. In these embodiments, the modified agent is a TNF family member (e.g. TNF-alpha, TNF-beta) which also, optionally, has substantially reduced or ablated affinity and/or activity for TNFR2. In some embodiments, the modified agent is a TNF family member (e.g. TNF-alpha, TNF-beta) which has reduced affinity and/or activity, i.e. antagonistic activity (e.g. natural antagonistic activity or antagonistic activity that is the result of one or more mutations, see, e.g., WO 2015/007520, the entire contents of which are hereby incorporated by reference) at TNFR2. In these embodiments, the modified agent is a TNF family member (e.g. TNF-alpha, TNF-beta) which also, optionally, has substantially reduced or ablated affinity and/or activity for TNFR1. The constructs of such embodiments find use in, for example, methods of dampening TNF response in a cell specific manner. In some embodiments, the antagonistic TNF family member (e.g. TNF-alpha, TNF-beta) is a single chain trimeric version as described in WO 2015/007903.

[0525] In an embodiment, the additional modified signaling agent is TRAIL. In some embodiments, the modified TRAIL agent has reduced affinity and/or activity for DR4 (TRAIL-RI) and/or DR5 (TRAIL-RII) and/or DcR1 and/or DcR2. In some embodiments, the modified TRAIL agent has substantially reduced or ablated affinity and/or activity for DR4 (TRAIL-RI) and/or DR5 (TRAIL-RII) and/or DcR1 and/or DcR2.

[0526] In an embodiment, the wild type TRAIL has the amino acid sequence of SEQ ID NO:239.

[0527] In such embodiments, the modified TRAIL agent may comprise a mutation at amino acid positions T127-R132, E144-R149, E155-H161, Y189-Y209, T214-1220, K224-A226, W231, E236-L239, E249-K251, T261-H264 and

[0528] H270-E271 (Numbering based on the human sequence, Genbank accession number NP_003801, version 10 NP_003801.1, GI: 4507593; see above).

[0529] In an embodiment, the additional modified signaling agent is TGFα. In such embodiments, the modified TGFα agent has reduced affinity and/or activity for the epidermal growth factor receptor (EGFR). In some embodiments, the modified TGFα agent has substantially reduced or ablated affinity and/or activity for the epidermal growth factor receptor (EGFR).

[0530] In an embodiment, the additional modified signaling agent is TGFβ. In such embodiments, the modified signaling agent has reduced affinity and/or activity for TGFBR1 and/or TGFBR2. In some embodiments, the modified signaling agent has substantially reduced or ablated affinity and/or activity for TGFBR1 and/or TGFBR2. In some embodiments, the modified signaling agent optionally has reduced or substantially reduced or ablated affinity and/or activity for TGFBR3 which, without wishing to be bound by theory, may act as a reservoir of ligand for TGF-beta receptors. In some embodiments, the TGFB may favor TGFBR1 over TGFBR2 or TGFBR2 over TGFBR1. Similarly, LAP, without wishing to be bound by theory, may act as a reservoir of ligand for TGF-beta receptors. In some embodiments, the modified signaling agent has reduced affinity and/or activity for TGFBR1 and/or TGFBR2 and/or substantially reduced or ablated affinity and/or activity for Latency Associated Peptide (LAP). In some embodiments, such chimeras find use in Camurati-Engelmann disease, or other diseases associated with inappropriate TGFβ signaling.

[0531] In some embodiments, the additional modified agent is a TGF family member (e.g. TGFα, TGFβ) which has reduced affinity and/or activity, i.e. antagonistic activity (e.g. natural antagonistic activity or antagonistic activity that is the result of one or more mutations, see, e.g., WO 2015/007520, the entire contents of which are hereby incorporated by reference) at one or more of TGFBR1, TGFBR2, TGFBR3. In these embodiments, the modified agent is a TGF family member (e.g. TGFα, TGFβ) which also, optionally, has substantially reduced or ablated affinity and/or activity at one or more of TGFBR1, TGFBR2, TGFBR3.

[0532] In some embodiments, the additional modified agent is a TGF family member (e.g. TGFα, TGFβ) which has reduced affinity and/or activity, i.e. antagonistic activity (e.g. natural antagonistic activity or antagonistic activity that is the result of one or more mutations, see, e.g., WO 2015/007520, the entire contents of which are hereby incorporated by reference) at TGFBR1 and/or TGFBR2. In these embodiments, the modified agent is a TGF family member (e.g. TGFα, TGFβ) which also, optionally, has substantially reduced or ablated affinity and/or activity at TGFBR3.

[0533] In an embodiment, the additional modified signaling agent is IL-1. In an embodiment, the modified signaling agent is IL-1α or IL-1β. In some embodiments, the modified signaling agent has reduced affinity and/or activity for IL-1R1 and/or IL-1RAcP. In some embodiments, the modified signaling agent has substantially reduced or ablated affinity and/or activity for IL-1R1 and/or IL-1RAcP. In some embodiments, the modified signaling agent has reduced affinity and/or activity for IL-1R2. In some embodiments, the modified signaling agent has substantially reduced or ablated affinity and/or activity for IL-1R2. For instance, in some embodiments, the present modified IL-1 agents avoid interaction at IL-1R2 and therefore substantially reduce its function as a decoy and/or sink for therapeutic agents.

[0534] In an embodiment, the wild type IL-1β has the amino acid sequence of SEQ ID NO:240.

[0535] IL-1β is a proinflammatory cytokine and an important immune system regulator. It is a potent activator of CD4 T cell responses, increases proportion of Th17 cells and expansion of IFNγ and IL-4 producing cells. IL-1β is also a potent regulator of CD8⁺ T cells, enhancing antigen-specific CD8⁺ T cell expansion, differentiation, migration to periphery and memory. IL-13 receptors comprise IL-1R1 and IL-1R2. Binding to and signaling through the IL-1R1 constitutes the mechanism whereby IL-1β mediates many of its biological (and pathological) activities. IL1-R2 can function as a decoy receptor, thereby reducing IL-1β availability for interaction and signaling through the IL-1R1.

[0536] In some embodiments, the modified IL-1β has reduced affinity and/or activity (e.g. agonistic activity) for IL-1R1. In some embodiments, the modified IL-1β has substantially reduced or ablated affinity and/or activity for IL-1R2. In such embodiments, there is inducible or restorable IL-1β/IL-1R1 signaling and prevention of loss of therapeutic chimeras at IL-R2 and therefore a reduction in dose of IL-1 that is required (e.g. relative to wild type or a chimera bearing only an attenuation mutation for IL-R1). Such constructs find use in, for example, methods of treating cancer, including, for example, stimulating the immune system to mount an anti-cancer response.

[0537] In some embodiments, the modified IL-1β has reduced affinity and/or activity (e.g. antagonistic activity, e.g. natural antagonistic activity or antagonistic activity that is the result of one or more mutations, see, e.g., WO 2015/007520, the entire contents of which are hereby incorporated by reference) for IL-1R1. In some embodiments, the modified IL-1β has substantially reduced or ablated affinity and/or activity for IL-1R2. In such embodiments, there is the IL-1B/IL-1R1 signaling is not inducible or restorable and prevention of loss of therapeutic chimeras at IL-R2 and therefore a reduction in dose of IL-1β that is required (e.g. relative to wild type or a chimera bearing only an attenuation mutation for IL-R1). Such constructs find use in, for example, methods of treating autoimmune diseases, including, for example, suppressing the immune system.

[0538] In such embodiments, the modified signaling agent has a deletion of amino acids 52-54 which produces a modified human IL-1β with reduced binding affinity for type I IL-1R and reduced biological activity. See, for example, WO 1994/000491, the entire contents of which are hereby incorporated by reference. In some embodiments, the modified human IL-1β has one or more substitution mutations selected from A117G/P118G, R120X, L122A, T125G/L126G, R127G, Q130X, Q131G, K132A, S137G/Q138Y, L145G, H146X, L145A/L147A, Q148X, Q148G/Q150G, Q150G/D151A, M152G, F162A, F162A/Q164E, F166A, Q164E/E167K, N169G/D170G, I172A, V174A, K208E, K209X, K209A/K210A, K219X, E221X, E221 S/N224A, N224S/K225S, E244K, N245Q (where X can be any change in amino acid, e.g., a non-conservative change), which exhibit reduced binding to IL-1R, as described, for example, in WO2015/007542 and WO/2015/007536, the entire contents of which is hereby incorporated by reference (numbering base on the human IL-1β sequence, Genbank accession number NP_000567, version NP-000567.1, GI: 10835145). In some embodiments, the modified human IL-1β may have one or more mutations selected from R120A, R120G, Q130A, Q130W, H146A, H146G, H146E, H146N, H146R, Q148E, Q148G, Q148L, K209A, K209D, K219S, K219Q, E221S and E221K. In an embodiment, the modified human IL-1β comprises the mutations Q131G and Q148G. In an embodiment, the modified human IL-1β comprises the mutations Q148G and K208E. In an embodiment, the modified human IL-1β comprises the mutations R120G and Q131G. In an embodiment, the modified human IL-1β comprises the mutations R120G and H146G. In an embodiment, the modified human IL-1β comprises the mutations R120G and K208E. In an embodiment, the modified human IL-1β comprises the mutations R120G, F162A, and Q164E.

[0539] In an embodiment, the additional modified signaling agent is IL-3. In some embodiments, the modified signaling agent has reduced affinity and/or activity for the IL-3 receptor, which is a heterodimer with a unique alpha chain paired with the common beta (beta c or CD131) subunit. In some embodiments, the modified signaling agent has substantially reduced or ablated affinity and/or activity for the IL-3 receptor, which is a heterodimer with a unique alpha chain paired with the common beta (beta c or CD131) subunit.

[0540] In an embodiment, the additional modified signaling agent is IL-4. In such an embodiment, the modified signaling agent has reduced affinity and/or activity for type 1 and/or type 2 IL-4 receptors. In such an embodiment, the modified signaling agent has substantially reduced or ablated affinity and/or activity for type 1 and/or type 2 IL-4 receptors. Type 1 IL-4 receptors are composed of the IL-4Rα subunit with a common γ chain and specifically bind IL-4. Type 2 IL-4 receptors include an IL-4Rα subunit bound to a different subunit known as IL-13Rα1. In some embodiments, the modified signaling agent has substantially reduced or ablated affinity and/or activity the type 2 IL-4 receptors.

[0541] In an embodiment, the wild type IL-4 has the amino acid sequence of SEQ ID NO:242.

[0542] In such embodiments, the modified IL-4 agent has one or more mutations at amino acids R121 (R121A, R121D, R121E, R121F, R121H, R1211, R121K, R121N, R121P, R121T, R121W), E122 (E122F), Y124 (Y124A, Y124Q, Y124R, Y124S, Y124T) and S125 (S125A). Without wishing to be bound by theory, it is believed that these modified IL-4 agents maintain the activity mediated by the type I receptor, but significantly reduces the biological activity mediated by the other receptors. See, for example, U.S. Pat. No. 6,433,157, the entire contents of which are hereby incorporated by reference.

[0543] In an embodiment, the additional modified signaling agent is IL-6. IL-6 signals through a cell-surface type I cytokine receptor complex including the ligand-binding IL-6R chain (CD126), and the signal-transducing component gp 130. IL-6 may also bind to a soluble form of IL-6R (sIL-6R), which is the extracellular portion of IL-6R. The sIL-6R/IL-6 complex may be involved in neurites outgrowth and survival of neurons and, hence, may be important in nerve regeneration through remyelination. Accordingly, in some embodiments, the modified signaling agent has reduced affinity and/or activity for IL-6R/gp130 and/or sIL-6R. In some embodiments, the modified signaling agent has substantially reduced or ablated affinity and/or activity for IL-6R/gp130 and/or sIL-6R.

[0544] In an embodiment, the wild type IL-6 has the amino acid sequence of SEQ ID NO:243.

[0545] In such embodiments, the modified signaling agent has one or more mutations at amino acids 58, 160, 163, 171 or 177. Without wishing to be bound by theory, it is believed that these modified IL-6 agents exhibit reduced binding affinity to IL-6Ralpha and reduced biological activity. See, for example, WO 97/10338, the entire contents of which are hereby incorporated by reference.

[0546] In an embodiment, the additional modified signaling agent is IL-10. In such an embodiment, the modified signaling agent has reduced affinity and/or activity for IL-10 receptor-1 and IL-10 receptor-2. In some embodiments, the modified signaling agent has substantially reduced or ablated affinity and/or activity for IL-10 receptor-1 and IL-10 receptor-2 In an embodiment, the additional modified signaling agent is IL-11. In such an embodiment, the modified signaling agent has reduced affinity and/or activity for IL-11Rα and/or IL-11RB and/or gp 130. In such an embodiment, the modified signaling agent has substantially reduced or ablated affinity and/or activity for IL-11Rα and/or IL-11RB and/or gp 130.

[0547] In an embodiment, the additional modified signaling agent is IL-12. In such an embodiment, the modified signaling agent has reduced affinity and/or activity for IL-12Rβ1 and/or IL-12Rβ2. In such an embodiment, the modified signaling agent has substantially reduced or ablated affinity and/or activity for IL-12Rβ1 and/or IL-12Rβ2.

[0548] In an embodiment, the additional modified signaling agent is IL-13. In such an embodiment, the modified signaling agent has reduced affinity and/or activity for the IL-4 receptor (IL-4Rα) and IL-13Rα1. In some embodiments, the modified signaling agent has substantially reduced or ablated affinity and/or activity for IL-4 receptor (IL-4Rα) or IL-13Rα1.

[0549] In an embodiment, the wild type IL-13 has the amino acid sequence of SEQ ID NO:244.

[0550] In such embodiments, the modified IL-13 agent has one or more mutations at amino acids 13, 16, 17, 66, 69, 99, 102, 104, 105, 106, 107, 108, 109, 112, 113 and 114. Without wishing to be bound by theory, it is believed that these modified IL-13 agents exhibit reduced biological activity. See, for example, WO 2002/018422, the entire contents of which are hereby incorporated by reference.

[0551] In an embodiment, the signaling agent is a wild type or modified IL-15. In embodiments, the modified IL-15 has reduced affinity and/or activity for interleukin 15 receptor.

[0552] In an embodiment, the wild type IL-15 has the amino acid sequence of:
[0553] NWVNVISDLKKIEDLIQSMHIDATLYTESDVHPSCKVTAMKCFLLELQVISHESGDTDIHDTVEN LIILANNILSSNGNITESGCKECEELEEKNIKEFLQSFVHIVQMFINTS (SEQ ID NO: 292).

[0554] In such embodiments, the modified IL-15 agent has one or more mutations at amino acids S7, D8, K10, K11, E46, L47, V49, 150, D61, N65, L66, 167, 168, L69, N72, Q108 with respect to SEQ ID NO: 292.

[0555] In an embodiment, the additional modified signaling agent is IL-18. In some embodiments, the modified signaling agent has reduced affinity and/or activity for IL-18Rα and/or IL-18Rβ. In some embodiments, the modified signaling agent has substantially reduced or ablated affinity and/or activity for IL-18Rα and/or IL-18Rβ. In some embodiments, the modified signaling agent has substantially reduced or ablated affinity and/or activity for IL-18Rα type II, which is an isoform of IL-18Rα that lacks the TIR domain required for signaling.

[0556] In an embodiment, the wild type IL-18 has the amino acid sequence of SEQ ID NO:245.

[0557] In such embodiments, the modified IL-18 agent may comprise one or more mutations in amino acids or amino acid regions selected from Y37-K44, R49-Q54, D59-R63, E67-C74, R80, M87-A97, N127-K129, Q139-M149, K 165-K171, R183 and Q190-N191, as described in WO/2015/007542, the entire contents of which are hereby incorporated by reference (numbering based on the human IL-18 sequence, Genbank accession number AAV38697, version AAV38697.1, GI: 54696650).

[0558] In an embodiment, the additional modified signaling agent is IL-33. In such an embodiment, the modified signaling agent has reduced affinity and/or activity for the ST-2 receptor and IL-1RAcP. In some embodiments, the modified signaling agent has substantially reduced or ablated affinity and/or activity for the ST-2 receptor and IL-1RAcP.

[0559] In an embodiment, the wild type IL-33 has the amino acid sequence of SEQ ID NO:246.

[0560] In such embodiments, the modified IL-33 agent may comprise one or more mutations in amino acids or amino acid regions selected from 1113-Y122, S127-E139, E144-D157, Y163-M183, E200, Q215, L220-C227 and T260-E269, as described in WO/2015/007542, the entire contents of which are hereby incorporated by reference (numbering based on the human sequence, Genbank accession number NP_254274, version NP_254274.1, GI: 15559209).

[0561] In an embodiment, the modified signaling agent is epidermal growth factor (EGF). EGF is a member of a family of potent growth factors. Members include EGF, HB-EGF, and others such as TGFalpha, amphiregulin, neuregulins, epiregulin, betacellulin. EGF family receptors include EGFR (ErbB1), ErbB2, ErbB3 and ErbB4. These may function as homodimeric and/or heterodimeric receptor subtypes. The different EGF family members exhibit differential selectivity for the various receptor subtypes. For example, EGF associates with ErbB1/ErbB1, ErbB1/ErbB2, ErbB4/ErbB2 and some other heterodimeric subtypes. HB-EGF has a similar pattern, although it also associates with ErbB4/4. Modulation of EGF (EGF-like) growth factor signaling, positively or negatively, is of considerable therapeutic interest. For example, inhibition of EGFRs signaling is of interest in the treatment of various cancers where EGFR signaling constitutes a major growth promoting signal. Alternatively, stimulation of EGFRs signaling is of therapeutic interest in, for example, promoting wound healing (acute and chronic), oral mucositis (a major side-effect of various cancer therapies, including, without limitation radiation therapy).

[0562] In some embodiments, the additional modified signaling agent has reduced affinity and/or activity for ErbB1, ErbB2, ErbB3, and/or ErbB4. Such embodiments find use, for example, in methods of treating wounds. In some embodiments, the modified signaling agent binds to one or more ErbB1, ErbB2, ErbB3, and ErbB4 and antagonizes the activity of the receptor. In such embodiments, the modified signaling agent has reduced affinity and/or activity for ErbB1, ErbB2, ErbB3, and/or ErbB4 which allows for the activity of the receptor to be antagonized in an attenuated fashion. Such embodiments find use in, for example, treatments of cancer. In an embodiment, the modified signaling agent has reduced affinity and/or activity for ErbB1. ErbB1 is the therapeutic target of kinase inhibitors-most have side effects because they are not very selective (e.g., gefitinib, erlotinib, afatinib, brigatinib and icotinib). In some embodiments, attenuated antagonistic ErbB1 signaling is more on-target and has less side effects than other agents targeting receptors for EGF.

[0563] In some embodiments, the additional modified signaling agent has reduced affinity and/or activity (e.g. antagonistic e.g. natural antagonistic activity or antagonistic activity that is the result of one or more mutations, see, e.g., WO 2015/007520, the entire contents of which are hereby incorporated by reference) for ErbB1 and/or substantially reduced or ablated affinity and/or activity for ErbB4 or other subtypes it may interact with. Through specific targeting via the targeting moiety, cell-selective suppression (antagonism e.g. natural antagonistic activity or antagonistic activity that is the result of one or more mutations, see, e.g., WO 2015/007520, the entire contents of which are hereby incorporated by reference) of ErbB1/ErbB1 receptor activation would be achieved—while not engaging other receptor subtypes potentially associated with inhibition-associated side effects. Hence, in contrast to EGFR kinase inhibitors, which inhibit EGFR activity in all cell types in the body, such a construct would provide a cell-selective (e.g., tumor cell with activated EGFR signaling due to amplification of receptor, overexpression etc.) anti-EGFR (ErbB1) drug effect with reduced side effects.

[0564] In some embodiments, the additional modified signaling agent has reduced affinity and/or activity (e.g. agonistic) for ErbB4 and/or other subtypes it may interact with. Through targeting to specific target cells through the targeting moiety, a selective activation of ErbB1 signaling is achieved (e.g. epithelial cells). Such a construct finds use, in some embodiments, in the treatment of wounds (promoting would healing) with reduced side effects, especially for treatment of chronic conditions and application other than topical application of a therapeutic (e.g. systemic wound healing)

[0565] In an embodiment, the modified signaling agent is insulin or insulin analogs. In some embodiments, the modified insulin or insulin analog has reduced affinity and/or activity for the insulin receptor and/or IGF1 or IGF2 receptor.

[0566] In some embodiments, the modified insulin or insulin analog has substantially reduced or ablated affinity and/or activity for the insulin receptor and/or IGF1 or IGF2 receptor. Attenuated response at the insulin receptor allows for the control of diabetes, obesity, metabolic disorders and the like while directing away from IGF 1 or IGF2 receptor avoids pro-cancer effects.

[0567] In an embodiment, the modified signaling agent is insulin-like growth factor-I or insulin-like growth factor-II (IGF-1 or IGF-2). In an embodiment, the modified signaling agent is IGF-1. In such an embodiment, the modified signaling agent has reduced affinity and/or activity for the insulin receptor and/or IGF1 receptor. In an embodiment, the modified signaling agent may bind to the IGF1 receptor and antagonize the activity of the receptor. In such an embodiment, the modified signaling agent has reduced affinity and/or activity for IGF1 receptor which allows for the activity of the receptor to be antagonized in an attenuated fashion. In some embodiments, the modified signaling agent has substantially reduced or ablated affinity and/or activity for the insulin receptor and/or IGF1 receptor. In some embodiments, the modified signaling agent has reduced affinity and/or activity for IGF2 receptor which allows for the activity of the receptor to be antagonized in an attenuated fashion. In an embodiment, the modified signaling agent has substantially reduced or ablated affinity and/or activity for the insulin receptor and accordingly does not interfere with insulin signaling. In various embodiments, this applies to cancer treatment. In various embodiments, the present agents may prevent IR isoform A from causing resistance to cancer treatments.

[0568] In an embodiment, the modified signaling agent is EPO. In various embodiments, the modified EPO agent has reduced affinity and/or activity for the EPO receptor (EPOR) receptor and/or the ephrin receptor (EphR) relative to wild type EPO or other EPO based agents described herein. In some embodiments, the modified EPO agent has substantially reduced or ablated affinity and/or activity for the EPO receptor (EPOR) receptor and/or the Eph receptor (EphR). Illustrative EPO receptors include, but are not limited to, an EPOR homodimer or an EPOR/CD131 heterodimer. Also included as an EPO receptor is beta-common receptor (BcR). Illustrative Eph receptors include, but are not limited to, EPHA1, EPHA2, EPHA3, EPHA4, EPHA5, EPHA6, EPHA7, EPHA8, EPHA9, EPHA10, EPHB1, EPHB2, EPHB3, EPHB4, EPHB5, and EPHB6. In some embodiments, the modified EPO protein comprises one or more mutations that cause the EPO protein to have reduced affinity for receptors that comprise one or more different EPO receptors or Eph receptors (e.g. heterodimer, heterotrimers, etc., including by way of non-limitation: EPOR-EPHB4, EPOR-BcR-EPOR). Also provided are the receptors of EP Patent Publication No. 2492355 the entire contents of which are hereby incorporated by reference, including by way of non-limitation, NEPORs.

[0569] In an embodiment, the human EPO has the amino acid sequence of SEQ ID NO:247 (first 27 amino acids are the signal peptide).

[0570] In an embodiment, the human EPO protein is the mature form of EPO (with the signal peptide being cleaved off) which is a glycoprotein of 166 amino acid residues having the sequence of SEQ ID NO:248.

[0571] The structure of the human EPO protein is predicted to comprise four-helix bundles including helices A, B, C, and D. In various embodiments, the modified EPO protein comprises one or more mutations located in four regions of the EPO protein which are important for bioactivity, i.e., amino acid residues 10-20, 44-51, 96-108, and 142-156. In some embodiments, the one or more mutations are located at residues 11-15, 44-51, 100-108, and 147-151. These residues are localized to helix A (Val11, Arg14, and Tyr15), helix C (Ser100, Arg103, Ser104, and Leu108), helix D (Asn147, Arg150, Glyl51, and Leu155), and the A/B connecting loop (residues 42-51). In some embodiments, the modified EPO protein comprises mutations in residues between amino acids 41-52 and amino acids 147, 150, 151, and 155. Without wishing to be bound by theory, it is believed that mutations of these residues have substantial effects on both receptor binding and in vitro biological activity. In some embodiments, the modified EPO protein comprises mutations at residues 11, 14, 15, 100, 103, 104, and 108. Without wishing to be bound by theory, it is believed that mutations of these residues have modest effects on receptor binding activity and much greater effects on in vitro biological activity. Illustrative substitutions include, but are not limited to, one or more of Val11Ser, Arg14Ala, Arg14Gln, Tyr15lle, Pro42Asn, Thr44lle, Lys45Asp, Val46Ala, Tyr51Phe, Ser100Glu, Ser100Thr, Arg103Ala, Ser104lle, Ser104Ala, Leu108Lys, Asn147Lys, Arg150Ala, Glyl51Ala, and Leu155Ala.

[0572] In some embodiments, the modified EPO protein comprises mutations that effect bioactivity and not binding, e.g. those listed in Eliot, et al. Mapping of the Active Site of Recombinant Human Erythropoietin Jan. 15, 1997; Blood: 89 (2), the entire contents of which are hereby incorporated by reference.

[0573] In some embodiments, the modified EPO protein comprises one or more mutations involving surface residues of the EPO protein which are involved in receptor contact. Without wishing to be bound by theory, it is believed that mutations of these surface residues are less likely to affect protein folding thereby retaining some biological activity. Illustrative surface residues that may be mutated include, but are not limited to, residues 147 and 150. In illustrative embodiments, the mutations are substitutions including, one or more of N147A, N147K, R150A and R150E.

[0574] In some embodiments, the modified EPO protein comprises one or more mutations at residues N59, E62, L67, and L70, and one or more mutations that affect disulfide bond formation. Without wishing to be bound by theory, it is believed that these mutations affect folding and/or are predicted be in buried positions and thus affects biological activity indirectly.

[0575] In an embodiment, the modified EPO protein comprises a K20E substitution which significantly reduces receptor binding. See Elliott, et al., (1997) Blood, 89:493-502, the entire contents of which are hereby incorporated by reference.

[0576] Additional EPO mutations that may be incorporated into the chimeric EPO protein of the invention are disclosed in, for example, Elliott, et al., (1997) Blood, 89:493-502, the entire contents of which are hereby incorporated by reference and Taylor et al., (2010) PEDS, 23(4): 251-260, the entire contents of which are hereby incorporated by reference.

[0577] In various embodiments, the signaling agent is a toxin or toxic enzyme. In some embodiments, the toxin or toxic enzyme is derived from plants and bacteria. Illustrative toxins or toxic enzymes include, but are not limited to, the diphtheria toxin, Pseudomonas toxin, anthrax toxin, ribosome-inactivating proteins (RIPs) such as ricin and saporin, modeccin, abrin, gelonin, and poke weed antiviral protein. Additional toxins include those disclosed in Mathew et al., (2009) Cancer Sci 100(8): 1359-65, the entire disclosures are hereby incorporated by reference. In such embodiments, the chimeric proteins or chimeric protein complexes such as Fc-based chimeric protein complex of the invention may be utilized to induce cell death in cell-type specific manner. In such embodiments, the toxin may be modified, e.g. mutated, to reduce affinity and/or activity of the toxin for an attenuated effect, as described with other signaling agents herein.

### Linkers and Functional Groups

[0578] In some embodiments, the present chimeric proteins or chimeric protein complexes, such as Fc-based chimeric protein complexes, optionally comprise one or more linkers. In some embodiments, the present chimeric proteins or chimeric protein complexes, such as Fc-based chimeric protein complexes, comprise a linker connecting the targeting moiety and the signaling agent (e.g., a modified IL-2). In some embodiments, the present chimeric proteins or chimeric protein complexes, such as Fc-based chimeric protein complexes, comprise a signaling agent (e.g., a modified IL-2) that comprises a linker. In some embodiments, the linker may be utilized to link various functional groups, residues, or moieties as described herein to the chimeric proteins or chimeric protein complexes, such as Fc-based chimeric protein complexes. In some embodiments, the linker is a single amino acid or a plurality of amino acids that does not affect or reduce the stability, orientation, binding, neutralization, and/or clearance characteristics of the binding regions and the binding protein. In various embodiments, the linker is selected from a peptide, a protein, a sugar, or a nucleic acid.

[0579] In some embodiments, vectors encoding the present chimeric proteins or chimeric protein complexes, such as Fc-based chimeric protein complexes, linked as a single nucleotide sequence to any of the linkers described herein are provided and may be used to prepare such chimeric proteins or chimeric protein complexes, such as Fc-based chimeric protein complexes. In embodiments, the substituents of the Fc-based chimeric protein complex are expressed as nucleotide sequences in a vector.

[0580] In some embodiments, the linker length allows for efficient binding of a targeting moiety and the signaling agent (e.g., a modified IL-2) to their receptors. For instance, in some embodiments, the linker length allows for efficient binding of one of the targeting moieties and the signaling agent to receptors on the same cell.

[0581] In some embodiments the linker length is at least equal to the minimum distance between the binding sites of one of the targeting moieties and the signaling agent to receptors on the same cell. In some embodiments the linker length is at least twice, or three times, or four times, or five times, or ten times, or twenty times, or 25 times, or 50 times, or one hundred times, or more the minimum distance between the binding sites of one of the targeting moieties and the signaling agent to receptors on the same cell.

[0582] As described herein, the linker length allows for efficient binding of one of the targeting moieties and the signaling agent to receptors on the same cell, the binding being sequential, e.g. targeting moiety/receptor binding preceding signaling agent/receptor binding.

[0583] In some embodiments, there are two linkers in a single chimera, each connecting the signaling agent to a targeting moiety. In various embodiments, the linkers have lengths that allow for the formation of a site that has a disease cell and an effector cell without steric hindrance that would prevent modulation of the either cell.

[0584] The invention contemplates the use of a variety of linker sequences. In various embodiments, the linker may be derived from naturally occurring multi-domain proteins or are empirical linkers as described, for example, in Chichili et al., (2013), Protein Sci. 22(2):153-167, Chen et al., (2013), Adv Drug Deliv Rev. 65(10): 1357-1369, the entire contents of which are hereby incorporated by reference. In some embodiments, the linker may be designed using linker designing databases and computer programs such as those described in Chen et al., (2013), Adv Drug Deliv Rev. 65(10): 1357-1369 and Crasto et al., (2000), Protein Eng. 13(5):309-312, the entire contents of which are hereby incorporated by reference. In various embodiments, the linker may be functional. For example, without limitation, the linker may function to improve the folding and/or stability, improve the expression, improve the pharmacokinetics, and/or improve the bioactivity of the present chimeric proteins or chimeric protein complexes such as Fc-based chimeric protein complex.

[0585] In some embodiments, the linker is a polypeptide. In some embodiments, the linker is less than about 100 amino acids long. For example, the linker may be less than about 100, about 95, about 90, about 85, about 80, about 75, about 70, about 65, about 60, about 55, about 50, about 45, about 40, about 35, about 30, about 25, about 20, about 19, about 18, about 17, about 16, about 15, about 14, about 13, about 12, about 11, about 10, about 9, about 8, about 7, about 6, about 5, about 4, about 3, or about 2 amino acids long. In some embodiments, the linker is a polypeptide. In some embodiments, the linker is greater than about 100 amino acids long. For example, the linker may be greater than about 100, about 95, about 90, about 85, about 80, about 75, about 70, about 65, about 60, about 55, about 50, about 45, about 40, about 35, about 30, about 25, about 20, about 19, about 18, about 17, about 16, about 15, about 14, about 13, about 12, about 11, about 10, about 9, about 8, about 7, about 6, about 5, about 4, about 3, or about 2 amino acids long. In some embodiments, the linker is flexible. In another embodiment, the linker is rigid.

[0586] In some embodiments directed to chimeric proteins or chimeric protein complexes, such as Fc-based chimeric protein complexes, having two or more targeting moieties, a linker connects the two targeting moieties to each other, and this linker has a short length and a linker connects a targeting moiety and a signaling agent this linker is longer than the linker connecting the two targeting moieties. For example, the difference in amino acid length between the linker connecting the two targeting moieties and the linker connecting a targeting moiety and a signaling agent may be about 100, about 95, about 90, about 85, about 80, about 75, about 70, about 65, about 60, about 55, about 50, about 45, about 40, about 35, about 30, about 25, about 20, about 19, about 18, about 17, about 16, about 15, about 14, about 13, about 12, about 11, about 10, about 9, about 8, about 7, about 6, about 5, about 4, about 3, or about 2 amino acids.

[0587] In various embodiments, the linker is substantially comprised of glycine and serine residues (e.g. about 30%, or about 40%, or about 50%, or about 60%, or about 70%, or about 80%, or about 90%, or about 95%, or about 97% glycines and serines). For example, in some embodiments, the linker is (Gly₄Ser)ₙ, where n is from about 1 to about 8, e.g. 1, 2, 3, 4, 5, 6, 7, or 8 (SEQ ID NO:249-SEQ ID NO:256, respectively). For example, in some embodiments, the linker is (Gly₃Ser)ₙ, where n is from about 1 to about 8, e.g. 1, 2, 3, 4, 5, 6, 7, or 8 (SEQ ID NO: 457-SEQ ID NO: 464, respectively). In an embodiment, the linker sequence is GGSGGSGGGGSGGGGS (SEQ ID NO:257). Additional illustrative linkers include, but are not limited to, linkers having the sequence LE, GGGGS (SEQ ID NO:249), (GGGGS)ₙ (n=1-4) (SEQ ID NO:249-SEQ ID NO:252), (Gly): (SEQ ID NO:258), (Gly)₆ (SEQ ID NO:259), (EAAAK)ₙ (n=1-3) (SEQ ID NO:260-SEQ ID NO:262), A(EAAAK)ₙA (n=2-5) (SEQ ID NO:263-SEQ ID NO:266), AEAAAKEAAAKA (SEQ ID NO:263), A(EAAAK)₄ALEA(EAAAK)₄A (SEQ ID NO:267), PAPAP (SEQ ID NO:268), KESGSVSSEQLAQFRSLD (SEQ ID NO:269), EGKSSGSGSESKST (SEQ ID NO:270), GSAGSAAGSGEF (SEQ ID NO:271), and (XP)n, with X designating any amino acid, e.g., Ala, Lys, or Glu. In various embodiments, the linker is GGS.

[0588] In some embodiments, the linker is one or more of GGGSE (SEQ ID NO: 272), GSESG (SEQ ID NO: 273), GSEGS (SEQ ID NO: 274), GEGGSGEGSSGEGSSSEGGGSEGGGSEGGGSEGGS (SEQ ID NO: 275), and a linker of randomly placed G, S, and E every 4 amino acid intervals.

[0589] In some embodiments, the linker is a hinge region of an antibody (e.g., of IgG, IgA, IgD, and IgE, inclusive of subclasses (e.g. IgG1, IgG2, IgG3, and IgG4, and IgA1 and IgA2). In various embodiments, the linker is a hinge region of an antibody (e.g., of IgG, IgA, IgD, and IgE, inclusive of subclasses (e.g. IgG1, IgG2, IgG3, and IgG4, and IgA1 and IgA2). The hinge region, found in IgG, IgA, IgD, and IgE class antibodies, acts as a flexible spacer, allowing the Fab portion to move freely in space. In contrast to the constant regions, the hinge domains are structurally diverse, varying in both sequence and length among immunoglobulin classes and subclasses. For example, the length and flexibility of the hinge region varies among the IgG subclasses. The hinge region of IgG1 encompasses amino acids 216-231 and, because it is freely flexible, the Fab fragments can rotate about their axes of symmetry and move within a sphere centered at the first of two inter-heavy chain disulfide bridges. IgG2 has a shorter hinge than IgG1, with 12 amino acid residues and four disulfide bridges. The hinge region of IgG2 lacks a glycine residue, is relatively short, and contains a rigid poly-proline double helix, stabilized by extra inter-heavy chain disulfide bridges. These properties restrict the flexibility of the IgG2 molecule. IgG3 differs from the other subclasses by its unique extended hinge region (about four times as long as the IgG1 hinge), containing 62 amino acids (including 21 prolines and 11 cysteines), forming an inflexible poly-proline double helix. In IgG3, the Fab fragments are relatively far away from the Fc fragment, giving the molecule a greater flexibility. The elongated hinge in IgG3 is also responsible for its higher molecular weight compared to the other subclasses. The hinge region of IgG4 is shorter than that of IgG1 and its flexibility is intermediate between that of IgG1 and IgG2. The flexibility of the hinge regions reportedly decreases in the order IgG3>IgG1>IgG4>IgG2.

[0590] According to crystallographic studies, the immunoglobulin hinge region can be further subdivided functionally into three regions: the upper hinge region, the core region, and the lower hinge region. See Shin et al., 1992 Immunological Reviews 130:87. The upper hinge region includes amino acids from the carboxyl end of CHI to the first residue in the hinge that restricts motion, generally the first cysteine residue that forms an interchain disulfide bond between the two heavy chains. The length of the upper hinge region correlates with the segmental flexibility of the antibody. The core hinge region contains the inter-heavy chain disulfide bridges, and the lower hinge region joins the amino terminal end of the C_{H2} domain and includes residues in C_{H2}. Id. The core hinge region of wild-type human IgG1 contains the sequence Cys-Pro-Pro-Cys (SEQ ID NO: 276), which when dimerized by disulfide bond formation, results in a cyclic octapeptide believed to act as a pivot, thus conferring flexibility. In various embodiments, the present linker comprises, one, or two, or three of the upper hinge region, the core region, and the lower hinge region of any antibody (e.g., of IgG, IgA, IgD, and IgE, inclusive of subclasses (e.g. IgG1, IgG2, IgG3, and IgG4, and IgA1 and IgA2). The hinge region may also contain one or more glycosylation sites, which include a number of structurally distinct types of sites for carbohydrate attachment. For example, IgA1 contains five glycosylation sites within a 17-amino-acid segment of the hinge region, conferring resistance of the hinge region polypeptide to intestinal proteases, considered an advantageous property for a secretory immunoglobulin. In various embodiments, the linker of the present invention comprises one or more glycosylation sites. In various embodiments, the linker is a hinge-CH2-CH3 domain of a human IgG4 antibody.

[0591] In some embodiments, the linker is a synthetic linker such as PEG.

[0592] In various embodiments, the linker may be functional. For example, without limitation, the linker may function to improve the folding and/or stability, improve the expression, improve the pharmacokinetics, and/or improve the bioactivity of the present chimeric proteins or chimeric protein complexes such as Fc-based chimeric protein complex. In another example, the linker may function to target the chimeric proteins or chimeric protein complexes such as Fc-based chimeric protein complex to a particular cell type or location.

[0593] In various embodiments, the present chimeric proteins or chimeric protein complexes such as Fc-based chimeric protein complex may include one or more functional groups, residues, or moieties. In various embodiments, the one or more functional groups, residues, or moieties are attached or genetically fused to any of the signaling agents or targeting moieties described herein. In some embodiments, such functional groups, residues or moieties confer one or more desired properties or functionalities to the chimeric proteins or chimeric protein complexes such as Fc-based chimeric protein complex of the invention. Examples of such functional groups and of techniques for introducing them into the chimeric proteins or chimeric protein complexes such as Fc-based chimeric protein complex are known in the art, for example, see Remington's Pharmaceutical Sciences, 16th ed., Mack Publishing Co., Easton, Pa. (1980).

[0594] In various embodiments, each of the chimeric proteins or chimeric protein complexes such as Fc-based chimeric protein complex may by conjugated and/or fused with another agent to extend half-life or otherwise improve pharmacodynamic and pharmacokinetic properties. In some embodiments, the chimeric proteins or chimeric protein complexes such as Fc-based chimeric protein complex may be fused or conjugated with one or more of PEG, XTEN (e.g., as rPEG), polysialic acid (POLYXEN), albumin (e.g., human serum albumin or HAS), elastin-like protein (ELP), PAS, HAP, GLK, CTP, transferrin, and the like. In various embodiments, each of the individual chimeric proteins or chimeric protein complexes such as Fc-based chimeric protein complex is fused to one or more of the agents described in BioDrugs (2015) 29:215-239, the entire contents of which are hereby incorporated by reference.

[0595] In some embodiments, the functional groups, residues, or moieties comprise a suitable pharmacologically acceptable polymer, such as poly(ethyleneglycol) (PEG) or derivatives thereof (such as methoxypoly(ethyleneglycol) or mPEG). In some embodiments, attachment of the PEG moiety increases the half-life and/or reduces the immunogenecity of the chimeric proteins or chimeric protein complexes such as Fc-based chimeric protein complex. Generally, any suitable form of pegylation can be used, such as the pegylation used in the art for antibodies and antibody fragments (including but not limited to single domain antibodies such as VHHs); see, for example, Chapman, Nat. Biotechnol., 54, 531-545 (2002); by Veronese and Harris, Adv. Drug Deliv. Rev. 54, 453-456 (2003), by Harris and Chess, Nat. Rev. Drug. Discov., 2, (2003) and in WO04060965, the entire contents of which are hereby incorporated by reference. Various reagents for pegylation of proteins are also commercially available, for example, from Nektar Therapeutics, USA. In some embodiments, site-directed pegylation is used, in particular via a cysteine-residue (see, for example, Yang et al., Protein Engineering, 16, 10, 761-770 (2003), the entire contents of which is hereby incorporated by reference). In some embodiments, the chimeric proteins or chimeric protein complexes such as Fc-based chimeric protein complex of the invention is modified so as to suitably introduce one or more cysteine residues for attachment of PEG, or an amino acid sequence comprising one or more cysteine residues for attachment of PEG may be fused to the amino- and/or carboxy-terminus of the chimeric proteins or chimeric protein complexes such as Fc-based chimeric protein complex, using techniques known in the art.

[0596] In some embodiments, the functional groups, residues, or moieties comprise N-linked or O-linked glycosylation. In some embodiments, the N-linked or O-linked glycosylation is introduced as part of a co-translational and/or post-translational modification.

[0597] In some embodiments, the functional groups, residues, or moieties comprise one or more detectable labels or other signal-generating groups or moieties. Suitable labels and techniques for attaching, using and detecting them are known in the art and, include, but are not limited to, fluorescent labels (such as fluorescein, isothiocyanate, rhodamine, phycoerythrin, phycocyanin, allophycocyanin, o-phthaldehyde, and fluorescamine and fluorescent metals such as Eu or others metals from the lanthanide series), phosphorescent labels, chemiluminescent labels or bioluminescent labels (such as luminal, isoluminol, theromatic acridinium ester, imidazole, acridinium salts, oxalate ester, dioxetane or GFP and its analogs), radio-isotopes, metals, metals chelates or metallic cations or other metals or metallic cations that are particularly suited for use in in vivo, in vitro or in situ diagnosis and imaging, as well as chromophores and enzymes (such as malate dehydrogenase, staphylococcal nuclease, delta-V-steroid isomerase, yeast alcohol dehydrogenase, alpha-glycerophosphate dehydrogenase, triose phosphate isomerase, biotinavidin peroxidase, horseradish peroxidase, alkaline phosphatase, asparaginase, glucose oxidase, beta-galactosidase, ribonuclease, urease, catalase, glucose-VI-phosphate dehydrogenase, glucoamylase and acetylcholine esterase). Other suitable labels include moieties that can be detected using NMR or ESR spectroscopy. Such labeled VHHs and polypeptides of the invention may, for example, be used for in vitro, in vivo or in situ assays (including immunoassays known per se such as ELISA, RIA, EIA and other “sandwich assays,” etc.) as well as in vivo diagnostic and imaging purposes, depending on the choice of the specific label.

[0598] In some embodiments, the functional groups, residues, or moieties comprise a tag that is attached or genetically fused to the chimeric proteins or chimeric protein complexes such as Fc-based chimeric protein complex. In some embodiments, the chimeric proteins or chimeric protein complexes such as Fc-based chimeric protein complex may include a single tag or multiple tags. The tag for example is a peptide, sugar, or DNA molecule that does not inhibit or prevent binding of the chimeric proteins or chimeric protein complexes such as Fc-based chimeric protein complex to its target or any other antigen of interest such as tumor antigens. In various embodiments, the tag is at least about: three to five amino acids long, five to eight amino acids long, eight to twelve amino acids long, twelve to fifteen amino acids long, or fifteen to twenty amino acids long. Illustrative tags are described for example, in U.S. Patent Publication No. US2013/0058962. In some embodiment, the tag is an affinity tag such as glutathione-S-transferase (GST) and histidine (His) tag. In an embodiment, the chimeric proteins or chimeric protein complexes such as Fc-based chimeric protein complex comprises a His tag.

[0599] In some embodiments, the functional groups, residues, or moieties comprise a chelating group, for example, to chelate one of the metals or metallic cations. Suitable chelating groups, for example, include, without limitation, diethyl-enetriaminepentaacetic acid (DTPA) or ethylenediaminetetraacetic acid (EDTA).

[0600] In some embodiments, the functional groups, residues, or moieties comprise a functional group that is one part of a specific binding pair, such as the biotin-(strept)avidin binding pair. Such a functional group may be used to link the chimeric proteins or chimeric protein complexes such as Fc-based chimeric protein complex of the invention to another protein, polypeptide or chemical compound that is bound to the other half of the binding pair, i.e., through formation of the binding pair. For example, a chimeric proteins or chimeric protein complexes such as Fc-based chimeric protein complex of the invention may be conjugated to biotin, and linked to another protein, polypeptide, compound or carrier conjugated to avidin or streptavidin. For example, such a conjugated chimeric proteins or chimeric protein complexes such as Fc-based chimeric protein complex may be used as a reporter, for example, in a diagnostic system where a detectable signal-producing agent is conjugated to avidin or streptavidin. Such binding pairs may, for example, also be used to bind the chimeric proteins or chimeric protein complexes such as Fc-based chimeric protein complex to a carrier, including carriers suitable for pharmaceutical purposes. One non-limiting example are the liposomal formulations described by Cao and Suresh, Journal of Drug Targeting, 8, 4, 257 (2000). Such binding pairs may also be used to link a therapeutically active agent to the chimeric proteins or chimeric protein complexes such as Fc-based chimeric protein complex of the invention.

Production of Chimeric Proteins or Chimeric Protein Complexes, such as Fc-Based Chimeric Protein Complexes

[0601] Methods for producing the chimeric proteins or chimeric protein complexes, such as Fc-based chimeric protein complexes, of the invention are described herein. For example, DNA sequences encoding the chimeric proteins or chimeric protein complexes such as Fc-based chimeric protein complex of the invention (e.g., DNA sequences encoding the signaling agent (e.g., a modified IL-2) and the targeting moiety and the linker) can be chemically synthesized using methods known in the art. Synthetic DNA sequences can be ligated to other appropriate nucleotide sequences, including, e.g., expression control sequences, to produce gene expression constructs encoding the desired chimeric proteins or chimeric protein complexes, such as Fc-based chimeric protein complexes. Accordingly, in various embodiments, the present invention provides for isolated nucleic acids comprising a nucleotide sequence encoding the chimeric proteins or chimeric protein complexes. such as Fc-based chimeric protein complexes, of the invention.

[0602] Nucleic acids encoding the chimeric proteins or chimeric protein complexes, such as Fc-based chimeric protein complexes, of the invention can be incorporated (ligated) into expression vectors, which can be introduced into host cells through transfection, transformation, or transduction techniques. For example, nucleic acids encoding the chimeric proteins or chimeric protein complexes, such as Fc-based chimeric protein complexes, of the invention can be introduced into host cells by retroviral transduction. Illustrative host cells are E. coli cells, Chinese hamster ovary (CHO) cells, human embryonic kidney 293 (HEK 293) cells, Hela cells, baby hamster kidney (BHK) cells, monkey kidney cells (COS), human hepatocellular carcinoma cells (e.g., Hep G2), insect Sf9 cells, and myeloma cells. Transformed host cells can be grown under conditions that permit the host cells to express the genes that encode the chimeric proteins or chimeric protein complexes, such as Fc-based chimeric protein complexes, of the invention. Accordingly, in various embodiments, the present invention provides expression vectors comprising nucleic acids that encode the chimeric proteins or chimeric protein complexes, such as Fc-based chimeric protein complexes, of the invention. In various embodiments, the present invention additional provides host cells comprising such expression vectors.

[0603] Specific expression and purification conditions will vary depending upon the expression system employed. For example, if a gene is to be expressed in E. coli, it is first cloned into an expression vector by positioning the engineered gene downstream from a suitable bacterial promoter, e.g., Trp or Tac, and a prokaryotic signal sequence. In another example, if the engineered gene is to be expressed in eukaryotic host cells, e.g., CHO cells, it is first inserted into an expression vector containing for example, a suitable eukaryotic promoter, a secretion signal, enhancers, and various introns. The gene construct can be introduced into the host cells using transfection, transformation, or transduction techniques.

[0604] The chimeric proteins or chimeric protein complexes, such as Fc-based chimeric protein complexes, of the invention can be produced by growing a host cell transfected with an expression vector encoding the chimeric proteins or chimeric protein complexes, such as Fc-based chimeric protein complexes, under conditions that permit expression of the protein. Following expression, the protein can be harvested and purified using techniques well known in the art, e.g., affinity tags such as glutathione-S-transferase (GST) and histidine tags or by chromatography.

[0605] Accordingly, in various embodiments, the present invention provides for a nucleic acid encoding a chimeric proteins or chimeric protein complexes, such as Fc-based chimeric protein complexes, of the present invention. In various embodiments, the present invention provides for a host cell comprising a nucleic acid encoding a chimeric proteins or chimeric protein complexes, such as Fc-based chimeric protein complexes, of the present invention.

[0606] In various embodiments, IL-2, its variant, or a chimeric proteins or chimeric protein complexes, such as Fc-based chimeric protein complexes, comprising the IL-2 or its variant may be expressed in vivo, for instance, in a patient. For example, in various embodiments, the IL-2, its variant, or a chimeric proteins or chimeric protein complexes such as Fc-based chimeric protein complexes comprising the IL-2 or its variant may administered in the form of nucleic acid which encodes for the IL-2 or its variant or chimeric proteins or chimeric protein complexes such as Fc-based chimeric protein complex comprising IL2 or its variant. In various embodiments, the nucleic acid is DNA or RNA. In some embodiments, the IL-2, its variant, or a chimeric proteins or chimeric protein complexes such as Fc-based chimeric protein complex comprising the IL-2 or its variant is encoded by a modified mRNA, i.e. an mRNA comprising one or more modified nucleotides. In some embodiments, the modified mRNA comprises one or modifications found in U.S. Pat. No. 8,278,036, the entire contents of which are hereby incorporated by reference. In some embodiments, the modified mRNA comprises one or more of m5C, m5U, m6A, s2U, Ψ, and 2′-O-methyl-U. In some embodiments, the present invention relates to administering a modified mRNA encoding one or more of the present chimeric proteins or chimeric protein complexes, such as Fc-based chimeric protein complexes. In some embodiments, the present invention relates to gene therapy vectors comprising the same. In some embodiments, the present invention relates to gene therapy methods comprising the same. In various embodiments, the nucleic acid is in the form of an oncolytic virus, e.g. an adenovirus, reovirus, measles, herpes simplex, Newcastle disease virus or vaccinia.

[0607] In various embodiments, the chimeric proteins or chimeric protein complexes, such as Fc-based chimeric protein complexes, comprises a targeting moiety that is a VHH. In various embodiments, the VHH is not limited to a specific biological source or to a specific method of preparation. For example, the VHH can generally be obtained: (1) by isolating the VHH domain of a naturally occurring heavy chain antibody; (2) by expression of a nucleotide sequence encoding a naturally occurring V_{H}H domain; (3) by “humanization” of a naturally occurring V_{H}H domain or by expression of a nucleic acid encoding a such humanized VHH domain; (4) by “camelization” of a naturally occurring VH domain from any animal species, such as from a mammalian species, such as from a human being, or by expression of a nucleic acid encoding such a camelized VH domain; (5) by “camelization” of a “domain antibody” or “Dab” as described in the art, or by expression of a nucleic acid encoding such a camelized VH domain; (6) by using synthetic or semi-synthetic techniques for preparing proteins, polypeptides or other amino acid sequences known in the art; (7) by preparing a nucleic acid encoding a VHH using techniques for nucleic acid synthesis known in the art, followed by expression of the nucleic acid thus obtained; and/or (8) by any combination of one or more of the foregoing.

[0608] In an embodiment, the chimeric proteins or chimeric protein complexes such as Fc-based chimeric protein complex comprises a VHH that corresponds to the VHH domains of naturally occurring heavy chain antibodies directed against a target of interest. In some embodiments, such VHH sequences can generally be generated or obtained by suitably immunizing a species of Camelid with a molecule of based on the target of interest (e.g., XCR1, Clec9a, CD8, SIRP1α, FAP, etc.) (i.e., so as to raise an immune response and/or heavy chain antibodies directed against the target of interest), by obtaining a suitable biological sample from the Camelid (such as a blood sample, or any sample of B-cells), and by generating V_{H}H sequences directed against the target of interest, starting from the sample, using any suitable known techniques. In some embodiments, naturally occurring V_{H}H domains against the target of interest can be obtained from naive libraries of Camelid V_{H}H sequences, for example, by screening such a library using the target of interest or at least one part, fragment, antigenic determinant or epitope thereof using one or more screening techniques known in the art. Such libraries and techniques are, for example, described in WO 9937681, WO 0190190, WO 03025020 and WO 03035694, the entire contents of which are hereby incorporated by reference. In some embodiments, improved synthetic or semi-synthetic libraries derived from naive V_{H}H libraries may be used, such as V_{H}H libraries obtained from naive V_{H}H libraries by techniques such as random mutagenesis and/or CDR shuffling, as for example, described in WO 0043507, the entire contents of which are hereby incorporated by reference. In some embodiments, another technique for obtaining VHH sequences directed against a target of interest involves suitably immunizing a transgenic mammal that is capable of expressing heavy chain antibodies (i.e., so as to raise an immune response and/or heavy chain antibodies directed against the target of interest), obtaining a suitable biological sample from the transgenic mammal (such as a blood sample, or any sample of B-cells), and then generating VHH sequences directed against XCR1 starting from the sample, using any suitable known techniques. For example, for this purpose, the heavy chain antibody-expressing mice and the further methods and techniques described in WO 02085945 and in WO 04049794 (the entire contents of which are hereby incorporated by reference) can be used.

[0609] In an embodiment, the chimeric proteins or chimeric protein complexes such as Fc-based chimeric protein complex comprises a VHH that has been “humanized” i.e., by replacing one or more amino acid residues in the amino acid sequence of the naturally occurring V_{H}H sequence (and in particular in the framework sequences) by one or more of the amino acid residues that occur at the corresponding position(s) in a VH domain from a conventional 4-chain antibody from a human being. This can be performed using humanization techniques known in the art. In some embodiments, possible humanizing substitutions or combinations of humanizing substitutions may be determined by methods known in the art, for example, by a comparison between the sequence of a VHH and the sequence of a naturally occurring human VH domain. In some embodiments, the humanizing substitutions are chosen such that the resulting humanized VHHs still retain advantageous functional properties. Generally, as a result of humanization, the VHHs of the invention may become more “human-like,” while still retaining favorable properties such as a reduced immunogenicity, compared to the corresponding naturally occurring V_{H}H domains. In various embodiments, the humanized VHHs of the invention can be obtained in any suitable manner known in the art and thus are not strictly limited to polypeptides that have been obtained using a polypeptide that comprises a naturally occurring VHH domain as a starting material.

[0610] In an embodiment, the chimeric proteins or chimeric protein complexes such as Fc-based chimeric protein complex comprises a VHH that has been “camelized,” i.e., by replacing one or more amino acid residues in the amino acid sequence of a naturally occurring VH domain from a conventional 4-chain antibody by one or more of the amino acid residues that occur at the corresponding position(s) in a VHH domain of a heavy chain antibody of a camelid. In some embodiments, such “camelizing” substitutions are inserted at amino acid positions that form and/or are present at the VH-VL interface, and/or at the so-called Camelidae hallmark residues (see, for example, WO9404678, the entire contents of which are hereby incorporated by reference). In some embodiments, the VH sequence that is used as a starting material or starting point for generating or designing the camelized VHH is a VH sequence from a mammal, for example, the VH sequence of a human being, such as a VH3 sequence. In various embodiments, the camelized VHHs can be obtained in any suitable manner known in the art (i.e., as indicated under points (1)-(8) above) and thus are not strictly limited to polypeptides that have been obtained using a polypeptide that comprises a naturally occurring VH domain as a starting material.

[0611] In various embodiments, both “humanization” and “camelization” can be performed by providing a nucleotide sequence that encodes a naturally occurring V_{H}H domain or VH domain, respectively, and then changing, in a manner known in the art, one or more codons in the nucleotide sequence in such a way that the new nucleotide sequence encodes a “humanized” or “camelized” VHH, respectively. This nucleic acid can then be expressed in a manner known in the art, so as to provide the desired VHH of the invention. Alternatively, based on the amino acid sequence of a naturally occurring V_{H}H domain or VH domain, respectively, the amino acid sequence of the desired humanized or camelized VHH of the invention, respectively, can be designed and then synthesized de novo using techniques for peptide synthesis known in the art. Also, based on the amino acid sequence or nucleotide sequence of a naturally occurring V_{H}H domain or VH domain, respectively, a nucleotide sequence encoding the desired humanized or camelized VHH, respectively, can be designed and then synthesized de novo using techniques for nucleic acid synthesis known in the art, after which the nucleic acid thus obtained can be expressed in a manner 20) known in the art, so as to provide the desired VHH of the invention. Other suitable methods and techniques for obtaining the VHHs of the invention and/or nucleic acids encoding the same, starting from naturally occurring VH sequences or V_{H}H sequences, are known in the art, and may, for example, comprise combining one or more parts of one or more naturally occurring VH sequences (such as one or more FR sequences and/or CDR sequences), one or more parts of one or more naturally occurring V_{H}H sequences (such as one or more FR sequences or CDR sequences), and/or one or more synthetic or semi-synthetic sequences, in a suitable manner, so as to provide a VHH of the invention or a nucleotide sequence or nucleic acid encoding the same.

### Pharmaceutically Acceptable Salts and Excipients

[0612] The chimeric proteins or chimeric protein complexes, such as Fc-based chimeric protein complexes, described herein can possess a sufficiently basic functional group, which can react with an inorganic or organic acid, or a carboxyl group, which can react with an inorganic or organic base, to form a pharmaceutically acceptable salt. A pharmaceutically acceptable acid addition salt is formed from a pharmaceutically acceptable acid, as is well known in the art. Such salts include the pharmaceutically acceptable salts listed in, for example, Journal of Pharmaceutical Science, 66, 2-19 (1977) and The Handbook of Pharmaceutical Salts; Properties, Selection, and Use. P. H. Stahl and C. G. Wermuth (eds.), Verlag, Zurich (Switzerland) 2002, which are hereby incorporated by reference in their entirety.

[0613] Pharmaceutically acceptable salts include, by way of non-limiting example, sulfate, citrate, acetate, oxalate, chloride, bromide, iodide, nitrate, bisulfate, phosphate, acid phosphate, isonicotinate, lactate, salicylate, acid citrate, tartrate, oleate, tannate, pantothenate, bitartrate, ascorbate, succinate, maleate, gentisinate, fumarate, gluconate, glucaronate, saccharate, formate, benzoate, glutamate, methanesulfonate, ethanesulfonate, benzenesulfonate, p-toluenesulfonate, camphorsulfonate, pamoate, phenylacetate, trifluoroacetate, acrylate, chlorobenzoate, dinitrobenzoate, hydroxybenzoate, methoxybenzoate, methylbenzoate, o-acetoxybenzoate, naphthalene-2-benzoate, isobutyrate, phenylbutyrate, α-hydroxybutyrate, butyne-1,4-dicarboxylate, hexyne-1,4-dicarboxylate, caprate, caprylate, cinnamate, glycollate, heptanoate, hippurate, malate, hydroxymaleate, malonate, mandelate, mesylate, nicotinate, phthalate, teraphthalate, propiolate, propionate, phenylpropionate, sebacate, suberate, p-bromobenzenesulfonate, chlorobenzenesulfonate, ethylsulfonate, 2-hydroxyethylsulfonate, methylsulfonate, naphthalene-1-sulfonate, naphthalene-2-sulfonate, naphthalene-1,5-sulfonate, xylenesulfonate, and tartarate salts.

[0614] The term “pharmaceutically acceptable salt” also refers to a salt of the compositions of the present invention having an acidic functional group, such as a carboxylic acid functional group, and a base. Suitable bases include, but are not limited to, hydroxides of alkali metals such as sodium, potassium, and lithium; hydroxides of alkaline earth metal such as calcium and magnesium; hydroxides of other metals, such as aluminum and zinc; ammonia, and organic amines, such as unsubstituted or hydroxy-substituted mono-, di-, or tri-alkylamines, dicyclohexylamine; tributyl amine; pyridine; N-methyl, N-ethylamine; diethylamine; triethylamine; mono-, bis-, or tris-(2-OH-lower alkylamines), such as mono-; bis-, or tris-(2-hydroxyethyl)amine, 2-hydroxy-tert-butylamine, or tris-(hydroxymethyl)methylamine, N,N-di-lower alkyl-N-(hydroxyl-lower alkyl)-amines, such as N,N-dimethyl-N-(2-hydroxyethyl) amine or tri-(2-hydroxyethyl)amine; N-methyl-D-glucamine; and amino acids such as arginine, lysine, and the like.

[0615] In some embodiments, the compositions described herein are in the form of a pharmaceutically acceptable salt.

### Pharmaceutical Compositions and Formulations

[0616] In various embodiments, the present invention pertains to pharmaceutical compositions comprising the chimeric proteins or chimeric protein complexes, such as Fc-based chimeric protein complexes, described herein and a pharmaceutically acceptable carrier or excipient. Any pharmaceutical compositions described herein can be administered to a subject as a component of a composition that comprises a pharmaceutically acceptable carrier or vehicle. Such compositions can optionally comprise a suitable amount of a pharmaceutically acceptable excipient so as to provide the form for proper administration.

[0617] In various embodiments, pharmaceutical excipients can be liquids, such as water and oils, including those of petroleum, animal, vegetable, or synthetic origin, such as peanut oil, soybean oil, mineral oil, sesame oil and the like. The pharmaceutical excipients can be, for example, saline, gum acacia, gelatin, starch paste, talc, keratin, colloidal silica, urea and the like. In addition, auxiliary, stabilizing, thickening, lubricating, and coloring agents can be used. In one embodiment, the pharmaceutically acceptable excipients are sterile when administered to a subject. Water is a useful excipient when any agent described herein is administered intravenously. Saline solutions and aqueous dextrose and glycerol solutions can also be employed as liquid excipients, specifically for injectable solutions. Suitable pharmaceutical excipients also include starch, glucose, lactose, sucrose, gelatin, malt, rice, flour, chalk, silica gel, sodium stearate, glycerol monostearate, talc, sodium chloride, dried skim milk, glycerol, propylene, glycol, water, ethanol and the like. Any agent described herein, if desired, can also comprise minor amounts of wetting or emulsifying agents, or pH buffering agents. Other examples of suitable pharmaceutical excipients are described in Remington's Pharmaceutical Sciences 1447-1676 (Alfonso R. Gennaro eds., 19th ed. 1995), incorporated herein by reference.

[0618] The present invention includes the described pharmaceutical compositions (and/or additional therapeutic agents) in various formulations. Any inventive pharmaceutical composition (and/or additional therapeutic agents) described herein can take the form of solutions, suspensions, emulsion, drops, tablets, pills, pellets, capsules, capsules containing liquids, gelatin capsules, powders, sustained-release formulations, suppositories, emulsions, aerosols, sprays, suspensions, lyophilized powder, frozen suspension, dessicated powder, or any other form suitable for use. In one embodiment, the composition is in the form of a capsule. In another embodiment, the composition is in the form of a tablet. In yet another embodiment, the pharmaceutical composition is formulated in the form of a soft-gel capsule. In a further embodiment, the pharmaceutical composition is formulated in the form of a gelatin capsule. In yet another embodiment, the pharmaceutical composition is formulated as a liquid.

[0619] Where necessary, the inventive pharmaceutical compositions (and/or additional agents) can also include a solubilizing agent. Also, the agents can be delivered with a suitable vehicle or delivery device as known in the art. Combination therapies outlined herein can be co-delivered in a single delivery vehicle or delivery device.

[0620] The formulations comprising the inventive pharmaceutical compositions (and/or additional agents) of the present invention may conveniently be presented in unit dosage forms and may be prepared by any of the methods well known in the art of pharmacy. Such methods generally include the step of bringing the therapeutic agents into association with a carrier, which constitutes one or more accessory ingredients. Typically, the formulations are prepared by uniformly and intimately bringing the therapeutic agent into association with a liquid carrier, a finely divided solid carrier, or both, and then, if necessary, shaping the product into dosage forms of the desired formulation (e.g., wet or dry granulation, powder blends, etc., followed by tableting using conventional methods known in the art).

[0621] In various embodiments, any pharmaceutical compositions (and/or additional agents) described herein is formulated in accordance with routine procedures as a composition adapted for a mode of administration described herein.

[0622] Routes of administration include, for example: oral, intradermal, intramuscular, intraperitoneal, intravenous, subcutaneous, intranasal, epidural, sublingual, intranasal, intracerebral, intravaginal, transdermal, rectally, by inhalation, or topically. Administration can be local or systemic. In some embodiments, the administering is effected orally. In another embodiment, the administration is by parenteral injection. The mode of administration can be left to the discretion of the practitioner, and depends in-part upon the site of the medical condition. In most instances, administration results in the release of any agent described herein into the bloodstream.

[0623] In one embodiment, the chimeric proteins or chimeric protein complexes such as Fc-based chimeric protein complex described herein is formulated in accordance with routine procedures as a composition adapted for oral administration. Compositions for oral delivery can be in the form of tablets, lozenges, aqueous or oily suspensions, granules, powders, emulsions, capsules, syrups, or elixirs, for example. Orally administered compositions can comprise one or more agents, for example, sweetening agents such as fructose, aspartame or saccharin; flavoring agents such as peppermint, oil of wintergreen, or cherry; coloring agents; and preserving agents, to provide a pharmaceutically palatable preparation. Moreover, where in tablet or pill form, the compositions can be coated to delay disintegration and absorption in the gastrointestinal tract thereby providing a sustained action over an extended period of time. Selectively permeable membranes surrounding an osmotically active driving any chimeric proteins or chimeric protein complexes such as Fc-based chimeric protein complex described herein are also suitable for orally administered compositions. In these latter platforms, fluid from the environment surrounding the capsule is imbibed by the driving compound, which swells to displace the agent or agent composition through an aperture. These delivery platforms can provide an essentially zero order delivery profile as opposed to the spiked profiles of immediate release formulations. A time-delay material such as glycerol monostearate or glycerol stearate can also be useful. Oral compositions can include standard excipients such as mannitol, lactose, starch, magnesium stearate, sodium saccharin, cellulose, and magnesium carbonate. In one embodiment, the excipients are of pharmaceutical grade. Suspensions, in addition to the active compounds, may contain suspending agents such as, for example, ethoxylated isostearyl alcohols, polyoxyethylene sorbitol and sorbitan esters, microcrystalline cellulose, aluminum metahydroxide, bentonite, agar-agar, tragacanth, etc., and mixtures thereof.

[0624] Dosage forms suitable for parenteral administration (e.g. intravenous, intramuscular, intraperitoneal, subcutaneous and intra-articular injection and infusion) include, for example, solutions, suspensions, dispersions, emulsions, and the like. They may also be manufactured in the form of sterile solid compositions (e.g. lyophilized composition), which can be dissolved or suspended in sterile injectable medium immediately before use. They may contain, for example, suspending or dispersing agents known in the art. Formulation components suitable for parenteral administration include a sterile diluent such as water for injection, saline solution, fixed oils, polyethylene glycols, glycerine, propylene glycol or other synthetic solvents; antibacterial agents such as benzyl alcohol or methyl paraben; antioxidants such as ascorbic acid or sodium bisulfite; chelating agents such as EDTA; buffers such as acetates, citrates or phosphates; and agents for the adjustment of tonicity such as sodium chloride or dextrose.

[0625] For intravenous administration, suitable carriers include physiological saline, bacteriostatic water, Cremophor ELTM (BASF, Parsippany, NJ) or phosphate buffered saline (PBS). The carrier should be stable under the conditions of manufacture and storage, and should be preserved against microorganisms. The carrier can be a solvent or dispersion medium containing, for example, water, ethanol, polyol (for example, glycerol, propylene glycol, and liquid polyetheylene glycol), and suitable mixtures thereof.

[0626] The compositions provided herein, alone or in combination with other suitable components, can be made into aerosol formulations (i.e., “nebulized”) to be administered via inhalation. Aerosol formulations can be placed into pressurized acceptable propellants, such as dichlorodifluoromethane, propane, nitrogen, and the like.

[0627] Any inventive pharmaceutical compositions (and/or additional agents) described herein can be administered by controlled-release or sustained-release means or by delivery devices that are well known to those of ordinary skill in the art. Examples include, but are not limited to, those described in U.S. Pat. Nos. 3,845,770; 3,916,899; 3,536,809; 3,598, 123; 4,008,719; 5,674,533; 5,059,595; 5,591,767; 5,120,548; 5,073,543; 5,639,476; 5,354,556; and 5,733,556, each of which is incorporated herein by reference in its entirety. Such dosage forms can be useful for providing controlled- or sustained-release of one or more active ingredients using, for example, hydropropyl cellulose, hydropropylmethyl cellulose, polyvinylpyrrolidone, other polymer matrices, gels, permeable membranes, osmotic systems, multilayer coatings, microparticles, liposomes, microspheres, or a combination thereof to provide the desired release profile in varying proportions. Suitable controlled- or sustained-release formulations known to those skilled in the art, including those described herein, can be readily selected for use with the active ingredients of the agents described herein. The invention thus provides single unit dosage forms suitable for oral administration such as, but not limited to, tablets, capsules, gelcaps, and caplets that are adapted for controlled- or sustained-release.

[0628] Controlled- or sustained-release of an active ingredient can be stimulated by various conditions, including but not limited to, changes in pH, changes in temperature, stimulation by an appropriate wavelength of light, concentration or availability of enzymes, concentration or availability of water, or other physiological conditions or compounds.

[0629] In another embodiment, a controlled-release system can be placed in proximity of the target area to be treated, thus requiring only a fraction of the systemic dose (see, e.g., Goodson, in Medical Applications of Controlled Release, supra, vol. 2, pp. 115-138 (1984)). Other controlled-release systems discussed in the review by Langer, 1990, Science 249:1527-1533) may be used.

[0630] Pharmaceutical formulations preferably are sterile. Sterilization can be accomplished, for example, by filtration through sterile filtration membranes. Where the composition is lyophilized, filter sterilization can be conducted prior to or following lyophilization and reconstitution.

### Administration and Dosage

[0631] It will be appreciated that the actual dose of the chimeric proteins or chimeric protein complexes, such as Fc-based chimeric protein complexes, to be administered according to the present invention will vary according to the particular dosage form, and the mode of administration. Many factors that may modify the action of the chimeric proteins or chimeric protein complexes, such as Fc-based chimeric protein complexes. For example, body weight, gender, diet, time of administration, route of administration, rate of excretion, condition of the subject, drug combinations, genetic disposition and reaction sensitivities) can be taken into account by those skilled in the art. Administration can be carried out continuously or in one or more discrete doses within the maximum tolerated dose. Optimal administration rates for a given set of conditions can be ascertained by those skilled in the art using conventional dosage administration tests.

[0632] In some embodiments, a suitable dosage of the chimeric proteins or chimeric protein complexes, such as Fc-based chimeric protein complexes, is in a range of about 0.01 μg/kg to about 100 mg/kg of body weight of the subject, about 0.01 μg/kg to about 10 mg/kg of body weight of the subject, or about 0.01 μg/kg to about 1 mg/kg of body weight of the subject for example, about 0.01 μg/kg, about 0.02 μg/kg, about 0.03 μg/kg, about 0.04 μg/kg, about 0.05 μg/kg, about 0.06 μg/kg, about 0.07 μg/kg, about 0.08 μg/kg, about 0.09 μg/kg, about 0.1 mg/kg, about 0.2 mg/kg, about 0.3 mg/kg, about 0.4 mg/kg, about 0.5 mg/kg, about 0.6 mg/kg, about 0.7 mg/kg, about 0.8 mg/kg, about 0.9 mg/kg, about 1 mg/kg, about 1.1 mg/kg, about 1.2 mg/kg, about 1.3 mg/kg, about 1.4 mg/kg, about 1.5 mg/kg, about 1.6 mg/kg, about 1.7 mg/kg, about 1.8 mg/kg, 1.9 mg/kg, about 2 mg/kg, about 3 mg/kg, about 4 mg/kg, about 5 mg/kg, about 6 mg/kg, about 7 mg/kg, about 8 mg/kg, about 9 mg/kg, about 10 mg/kg body weight, or about 100 mg/kg body weight, inclusive of all values and ranges therebetween.

[0633] Individual doses of the chimeric proteins or chimeric protein complexes, such as Fc-based chimeric protein complexes, can be administered in unit dosage forms (e.g., tablets, capsules, or liquid formulations) containing, for example, from about 1 μg to about 100 mg, from about 1 μg to about 90 mg, from about 1 μg to about 80 mg, from about 1 μg to about 70 mg, from about 1 μg to about 60 mg, from about 1 μg to about 50 mg, from about 1 μg to about 40 mg, from about 1 μg to about 30 mg, from about 1 μg to about 20 mg, from about 1 μg to about 10 mg, from about 1 μg to about 5 mg, from about 1 μg to about 3 mg, from about 1 μg to about 1 mg per unit dosage form, or from about 1 μg to about 50 μg per unit dosage form. For example, a unit dosage form can be about 1 μg, about 2 μg, about 3 μg, about 4 μg, about 5 μg, about 6 μg, about 7 μg, about 8 μg, about 9 μg, about 10 μg, about 11 μg, about 12 μg, about 13 μg, about 14 μg, about 15 μg, about 16 μg, about 17 μg, about 18 μg, about 19 μg, about 20 μg, about 21 μg, about 22 μg, about 23 μg, about 24 μg, about 25 μg, about 26 μg, about 27 μg, about 28 μg, about 29, about 30 μg, about 35 μg, about 40 μg, about 45 μg, about 50 μg, about 60 μg, about 70 μg, about 80 μg, about 90 μg, about 0.1 mg, about 0.2 mg, about 0.3 mg, about 0.4 mg, about 0.5 mg, about 0.6 mg, about 0.7 mg, about 0.8 mg, about 0.9 mg, about 1 mg, about 2 mg, about 3 mg, about 4 mg, about 5 mg, about 6 mg, about 7 mg, about 8 mg, about 9 mg, about 10 mg, about 15 mg, about 20 mg, about mg, about 30 mg, about 35 mg, about 40 mg, about 45 mg, about 50 mg, about 55 mg, about 60 mg, about 65 mg, about 70 mg, about 75 mg, about 80 mg, about 85 mg, about 90 mg, about 95 mg, or about 100 mg, inclusive of all values and ranges therebetween.

[0634] In one embodiment, the chimeric proteins or chimeric protein complexes, such as Fc-based chimeric protein complexes, is administered at an amount of from about 1 μg to about 100 mg daily, from about 1 μg to about 90 mg daily, from about 1 μg to about 80 mg daily, from about 1 μg to about 70 mg daily, from about 1 μg to about 60 mg daily, from about 1 μg to about 50 mg daily, from about 1 μg to about 40 mg daily, from about 1 μg to about 30 mg daily, from about 1 μg to about 20 mg daily, from about 01 μg to about 10 mg daily, from about 1 μg to about 5 mg daily, from about 1 μg to about 3 mg daily, or from about 1 μg to about 1 mg daily. In various embodiments, the chimeric proteins or chimeric protein complexes such as Fc-based chimeric protein complex is administered at a daily dose of about 1 μg, about 2 μg, about 3 μg, about 4 μg, about 5 μg, about 6 μg, about 7 μg, about 8 μg, about 9 μg, about 10 μg, about 11 μg, about 12 μg, about 13 μg, about 14 μg, about 15 μg, about 16 μg, about 17 μg, about 18 μg, about 19 μg, about 20 μg,, about 21 μg, about 22 μg, about 23 μg, about 24 jug, about 25 μg, about 26 μg, about 27 μg, about 28 μg, about 29, about 30 μg, about 35 μg, about 40 μg, about 45 μg, about 50 μg, about 60 μg, about 70 μg, about 80 μg, about 90 μg, about 0.1 mg, about 0.2 mg, about 0.3 mg, about 0.4 mg, about 0.5 mg, about 0.6 mg, about 0.7 mg, about 0.8 mg, about 0.9 mg, about 1 mg, about 2 mg, about 3 mg, about 4 mg, about 5 mg, about 6 mg, about 7 mg, about 8 mg, about 9 mg, about 10 mg, about 15 mg, about 20 mg, about 25 mg, about 30 mg, about 35 mg, about 40 mg, about 45 mg, about 50 mg, about 55 mg, about 60 mg, about 65 mg, about 70 mg, about 75 mg, about 80 mg, about 85 mg, about 90 mg, about 95 mg, or about 100 mg, inclusive of all values and ranges therebetween.

[0635] In accordance with certain embodiments of the invention, the pharmaceutical composition comprising the chimeric proteins or chimeric protein complexes, such as Fc-based chimeric protein complexes, may be administered, for example, more than once daily (e.g., about two times, about three times, about four times, about five times, about six times, about seven times, about eight times, about nine times, or about ten times daily), about once per day, about every other day, about every third day, about once a week, about once every two weeks, about once every month, about once every two months, about once every three months, about once every six months, or about once every year. In an embodiment, the pharmaceutical composition comprising the chimeric proteins or chimeric protein complexes, such as Fc-based chimeric protein complexes, is administered about three times a week.

[0636] In various embodiments, the present chimeric proteins or chimeric protein complexes, such as Fc-based chimeric protein complexes, may be administered for a prolonged period. For example, the chimeric proteins or chimeric protein complexes, such as Fc-based chimeric protein complexes, may be administered as described herein for at least about 1 week, at least about 2 weeks, at least about 3 weeks, at least about 4 weeks, at least about 5 weeks, at least about 6 weeks, at least about 7 weeks, at least about 8 weeks, at least about 9 weeks, at least about 10 weeks, at least about 11 weeks, or at least about 12 weeks. For example, the chimeric proteins or chimeric protein complexes, such as Fc-based chimeric protein complexes, may be administered for 12 weeks, 24 weeks, 36 weeks or 48 weeks. In some embodiments, the chimeric proteins or chimeric protein complexes, such as Fc-based chimeric protein complexes, are administered for at least about 1 month, at least about 2 months, at least about 3 months, at least about 4 months, at least about 5 months, at least about 6 months, at least about 7 months, at least about 8 months, at least about 9 months, at least about 10 months, at least about 11 months, or at least about 12 months. n some embodiments, the chimeric proteins or chimeric protein complexes, such as Fc-based chimeric protein complexes, may be administered for at least about 1 year, at least about 2 years, at least about 3 years, at least about 4 years, or at least about 5 years.

### Combination Therapy and Additional Therapeutic Agents

[0637] In various embodiments, the pharmaceutical composition of the present invention is co-administered in conjunction with additional therapeutic agent(s). Co-administration can be simultaneous or sequential.

[0638] In one embodiment, the additional therapeutic agent and the chimeric proteins or chimeric protein complexes, such as Fc-based chimeric protein complexes, of the present invention are administered to a subject simultaneously. The term “simultaneously” as used herein, means that the additional therapeutic agent and the chimeric proteins or chimeric protein complexes, such as Fc-based chimeric protein complexes, are administered with a time separation of no more than about 60 minutes, such as no more than about 30 minutes, no more than about 20 minutes, no more than about 10 minutes, no more than about 5 minutes, or no more than about 1 minute. Administration of the additional therapeutic agent and the chimeric proteins or chimeric protein complexes, such as Fc-based chimeric protein complexes, can be by simultaneous administration of a single formulation (e.g., a formulation comprising the additional therapeutic agent and the chimeric proteins or chimeric protein complexes such as Fc-based chimeric protein complex) or of separate formulations (e.g., a first formulation including the additional therapeutic agent and a second formulation including the chimeric proteins or chimeric protein complexes such as Fc-based chimeric protein complex).

[0639] Co-administration does not require the therapeutic agents to be administered simultaneously, if the timing of their administration is such that the pharmacological activities of the additional therapeutic agent and the chimeric proteins or chimeric protein complexes such as Fc-based chimeric protein complex overlap in time, thereby exerting a combined therapeutic effect. For example, the additional therapeutic agent and the chimeric proteins or chimeric protein complexes such as Fc-based chimeric protein complex can be administered sequentially. The term “sequentially” as used herein means that the additional therapeutic agent and the chimeric proteins or chimeric protein complexes such as Fc-based chimeric protein complex are administered with a time separation of more than about 60 minutes. For example, the time between the sequential administration of the additional therapeutic agent and the chimeric proteins or chimeric protein complexes such as Fc-based chimeric protein complex can be more than about 60 minutes, more than about 2 hours, more than about 5 hours, more than about hours, more than about 1 day, more than about 2 days, more than about 3 days, more than about 1 week apart, more than about 2 weeks apart, or more than about one month apart. The optimal administration times will depend on the rates of metabolism, excretion, and/or the pharmacodynamic activity of the additional therapeutic agent and the chimeric proteins or chimeric protein complexes such as Fc-based chimeric protein complex being administered. Either the additional therapeutic agent or the chimeric proteins or chimeric protein complexes such as Fc-based chimeric protein complex cell may be administered first.

[0640] Co-administration also does not require the therapeutic agents to be administered to the subject by the same route of administration. Rather, each therapeutic agent can be administered by any appropriate route, for example, parenterally or non-parenterally.

[0641] In some embodiments, the chimeric proteins or chimeric protein complexes such as Fc-based chimeric protein complex described herein acts synergistically when co-administered with another therapeutic agent. In such embodiments, the chimeric proteins or chimeric protein complexes such as Fc-based chimeric protein complex and the additional therapeutic agent may be administered at doses that are lower than the doses employed when the agents are used in the context of monotherapy.

[0642] In some embodiments, the present invention pertains to chemotherapeutic agents as additional therapeutic agents. For example, without limitation, such combination of the present chimeric proteins or chimeric protein complexes such as Fc-based chimeric protein complex and chemotherapeutic agent find use in the treatment of cancers, as described elsewhere herein. Examples of chemotherapeutic agents include, but are not limited to, alkylating agents such as thiotepa and CYTOXAN cyclosphosphamide; alkyl sulfonates such as busulfan, improsulfan and piposulfan; aziridines such as benzodopa, carboquone, meturedopa, and uredopa; ethylenimines and methylamelamines including altretamine, triethylenemelamine, trietylenephosphoramide, triethiylenethiophosphoramide and trimethylolomelamine; acetogenins (e.g., bullatacin and bullatacinone); a camptothecin (including the synthetic analogue topotecan); bryostatin; cally statin; CC-1065 (including its adozelesin, carzelesin and bizelesin synthetic analogues); cryptophycins (e.g., cryptophycin 1 and cryptophycin 8); dolastatin; duocarmycin (including the synthetic analogues, KW-2189 and CB 1-TM1); eleutherobin; pancratistatin; a sarcodictyin; spongistatin; nitrogen mustards such as chlorambucil, chlornaphazine, cholophosphamide, estramustine, ifosfamide, mechlorethamine, mechlorethamine oxide hydrochloride, melphalan, novembichin, phenesterine, prednimustine, trofosfamide, uracil mustard; nitrosureas such as carmustine, chlorozotocin, fotemustine, lomustine, nimustine, and ranimnustine; antibiotics such as the enediyne antibiotics (e.g., calicheamicin, especially calicheamicin gammall and calicheamicin omegall (see, e.g., Agnew, Chem. Intl. Ed. Engl., 33: 183-186 (1994)); dynemicin, including dynemicin A; bisphosphonates, such as clodronate; an esperamicin; as well as neocarzinostatin chromophore and related chromoprotein enediyne antibiotic chromophores), aclacinomysins, actinomycin, authramycin, azaserine, bleomycins, cactinomycin, carabicin, caminomycin, carzinophilin, chromomycinis, dactinomycin, daunorubicin, detorubicin, 6-diazo-5-oxo-L-norleucine, ADRIAMYCIN doxorubicin (including morpholino-doxorubicin, cyanomorpholino-doxorubicin, 2-pyrrolino-doxorubicin and deoxy doxorubicin), epirubicin, esorubicin, idarubicin, marcellomycin, mitomycins such as mitomycin C, mycophenolic acid, nogalamycin, olivomycins, peplomycin, potfiromycin, puromycin, quelamycin, rodorubicin, streptonigrin, streptozocin, tubercidin, ubenimex, zinostatin, zorubicin; anti-metabolites such as methotrexate and 5-fluorouracil (5-FU); folic acid analogues such as denopterin, methotrexate, pteropterin, trimetrexate; purine analogs such as fludarabine, 6-mercaptopurine, thiamiprine, thioguanine; pyrimidine analogs such as ancitabine, azacitidine, 6-azauridine, carmofur, cytarabine, dideoxyuridine, doxifluridine, enocitabine, floxuridine; androgens such as calusterone, dromostanolone propionate, epitiostanol, mepitiostane, testolactone; anti-adrenals such as minoglutethimide, mitotane, trilostane; folic acid replenisher such as frolinic acid; aceglatone; aldophosphamide glycoside; aminolevulinic acid; eniluracil; amsacrine; bestrabucil; bisantrene; edatraxate; demecolcine; diaziquone; elformithine; elliptinium acetate; an epothilone; etoglucid; gallium nitrate; hydroxyurea; lentinan; lonidainine; maytansinoids such as maytansine and ansamitocins; mitoguazone; mitoxantrone; mopidanmol; nitraerine; pentostatin; phenamet; pirarubicin; losoxantrone; podophyllinic acid; 2-ethylhydrazide; procarbazine; PSK polysaccharide complex (JHS Natural Products, Eugene, Oreg.); razoxane; rhizoxin; sizofuran; spirogermanium; tenuazonic acid; triaziquone; 2,2′,2″-trichlorotriethylamine; trichothecenes (e.g., T-2 toxin, verracurin A, roridin A and anguidine); urethan; vindesine; dacarbazine; mannomustine; mitobronitol; mitolactol; pipobroman; gacytosine; arabinoside (“Ara-C”); cyclophosphamide; thiotepa; taxoids, e.g., TAXOL paclitaxel (Bristol-Myers Squibb Oncology, Princeton, N.J.), ABRAXANE Cremophor-free, albumin-engineered nanoparticle formulation of paclitaxel (American Pharmaceutical Partners, Schaumberg, 111.), and TAXOTERE doxetaxel (Rhone-Poulenc Rorer, Antony, France); chloranbucil; GEMZAR gemcitabine; 6-thioguanine; mercaptopurine; methotrexate; platinum analogs such as cisplatin, oxaliplatin and carboplatin; vinblastine; platinum; etoposide (VP-16); ifosfamide; mitoxantrone; vincristine; NAVELBINE. vinorelbine; novantrone; teniposide; edatrexate; daunomycin; aminopterin; xeloda; ibandronate; irinotecan (Camptosar, CPT-11) (including the treatment regimen of irinotecan with 5-FU and leucovorin); topoisomerase inhibitor RFS 2000; difluoromethylornithine (DMFO); retinoids such as retinoic acid; capecitabine; combretastatin; leucovorin (LV); oxaliplatin, including the oxaliplatin treatment regimen (FOLFOX); lapatinib (Tykerb); inhibitors of PKC-α, Raf, H-Ras, EGFR (e.g., erlotinib (Tarceva)) and VEGF-A that reduce cell proliferation and pharmaceutically acceptable salts, acids or derivatives of any of the above. In addition, the methods of treatment can further include the use of radiation. In addition, the methods of treatment can further include the use of photodynamic therapy.

[0643] In some embodiments, inclusive of, without limitation, infectious disease applications, the present invention pertains to anti-infectives as additional therapeutic agents. In some embodiments, the anti-infective is an anti-viral agent including, but not limited to, Abacavir, Acyclovir, Adefovir, Amprenavir, Atazanavir, Cidofovir, Darunavir, Delavirdine, Didanosine, Docosanol, Efavirenz, Elvitegravir, Emtricitabine, Enfuvirtide, Etravirine, Famciclovir, and Foscarnet. In some embodiments, the anti-infective is an anti-bacterial agent including, but not limited to, cephalosporin antibiotics (cephalexin, cefuroxime, cefadroxil, cefazolin, cephalothin, cefaclor, cefamandole, cefoxitin, cefprozil, and ceftobiprole); fluoroquinolone antibiotics (cipro, Levaquin, floxin, tequin, avelox, and norflox); tetracycline antibiotics (tetracycline, minocycline, oxytetracycline, and doxycycline); penicillin antibiotics (amoxicillin, ampicilin, penicillin V, dicloxacillin, carbenicillin, vancomycin, and methicillin); monobactam antibiotics (aztreonam); and carbapenem antibiotics (ertapenem, doripenem, imipenem/cilastatin, and meropenem). In some embodiments, the anti-infectives include anti-malarial agents (e.g., chloroquine, quinine, mefloquine, primaquine, doxycycline, artemether/lumefantrine, atovaquone/proguanil and sulfadoxine/pyrimethamine), metronidazole, tinidazole, ivermectin, pyrantel pamoate, and albendazole.

[0644] In illustrative embodiments, the present invention pertains to the use of hepatitis therapeutics as additional therapeutic agents. In various embodiments, the hepatitis therapeutics include, but are not limited to, IFN-α such as INTRON A or pegylated IFN-α such as Pegasys or PEG-INTRON, ribavirin, boceprevir, simeprevir, sofosbuvir, simeprevir, daclatasvir, ledipasvir/sofosbuvir (Harvoni), ombitasvir/paritaprevir/ritonavir (Technivie), ombitasvir/paritaprevir/ritonavir/dasabuvir (Viekira Pak), lamivudine, adefovir, entecavir, telbivudine, entecavir, tenofovir, velpatasvir, elbasvir, grazoprevir, dasabuvir, and any combinations thereof. In an embodiment, the additional therapeutic agent is IFN-α (e.g., INTRON A) or pegylated IFN-α (e.g., Pegasys or PEG-INTRON). In another embodiment, the additional therapeutic agent is ribavirin.

[0645] In some embodiments, the present invention relates to combination therapies using the chimeric proteins or chimeric protein complexes such as Fc-based chimeric protein complex and an immunosuppressive agent. In some embodiments, the present invention relates to administration of the Clec9A binding agent to a patient undergoing treatment with an immunosuppressive agent.

[0646] In an embodiment, the immunosuppressive agent is TNF. In illustrative embodiments, the chimeric proteins or chimeric protein complexes such as Fc-based chimeric protein complex act synergistically when co-administered with TNF. In an illustrative embodiment, the chimeric proteins or chimeric protein complexes such as Fc-based chimeric protein complex acts synergistically when co-administered with TNF for use in treating tumor or cancer. For example, co-administration of the chimeric proteins or chimeric protein complexes such as Fc-based chimeric protein complex of the present invention and TNF may act synergistically to reduce or eliminate the tumor or cancer, or slow the growth and/or progression and/or metastasis of the tumor or cancer. In some embodiments, the combination of the chimeric proteins or chimeric protein complexes such as Fc-based chimeric protein complex and TNF may exhibit improved safety profiles when compared to the agents used alone in the context of monotherapy. In some embodiments, the chimeric proteins or chimeric protein complexes such as Fc-based chimeric protein complex and TNF may be administered at doses that are lower than the doses employed when the agents are used in the context of monotherapy.

[0647] In some embodiments, inclusive, without limitation, of autoimmune applications, the additional therapeutic agent is an immunosuppressive agent that is an anti-inflammatory agent such as a steroidal anti-inflammatory agent or a non-steroidal anti-inflammatory agent (NSAID). Steroids, particularly the adrenal corticosteroids and their synthetic analogues, are well known in the art. Examples of corticosteroids useful in the present invention include, without limitation, hydroxyltriamcinolone, alpha-methyl dexamethasone, beta-methyl betamethasone, beclomethasone dipropionate, betamethasone benzoate, betamethasone dipropionate, betamethasone valerate, clobetasol valerate, desonide, desoxymethasone, dexamethasone, diflorasone diacetate, diflucortolone valerate, fluadrenolone, fluclorolone acetonide, flumethasone pivalate, fluosinolone acetonide, fluocinonide, flucortine butylester, fluocortolone, fluprednidene (fluprednylidene) acetate, flurandrenolone, halcinonide, hydrocortisone acetate, hydrocortisone butyrate, methylprednisolone, triamcinolone acetonide, cortisone, cortodoxone, flucetonide, fludrocortisone, difluorosone diacetate, fluradrenolone acetonide, medrysone, amcinafel, amcinafide, betamethasone and the balance of its esters, chloroprednisone, clocortelone, clescinolone, dichlorisone, difluprednate, flucloronide, flunisolide, fluoromethalone, fluperolone, fluprednisolone, hydrocortisone, meprednisone, paramethasone, prednisolone, prednisone, beclomethasone dipropionate. (NSAIDS) that may be used in the present invention, include but are not limited to, salicylic acid, acetyl salicylic acid, methyl salicylate, glycol salicylate, salicylmides, benzyl-2,5-diacetoxybenzoic acid, ibuprofen, fulindac, naproxen, ketoprofen, etofenamate, phenylbutazone, and indomethacin. In some embodiments, the immunosupressive agent may be cytostatics such as alkylating agents, antimetabolites (e.g., azathioprine, methotrexate), cytotoxic antibiotics, antibodies (e.g., basiliximab, daclizumab, and muromonab), anti-immunophilins (e.g., cyclosporine, tacrolimus, sirolimus), inteferons, opioids, TNF binding proteins, mycophenolates, and small biological agents (e.g., fingolimod, myriocin). Additional anti-inflammatory agents are described, for example, in U.S. Pat. No. 4,537,776, the entire contents of which is incorporated by reference herein.

[0648] In some embodiments, the present invention pertains to various agents used for treating obesity as additional therapeutic agents. Illustrative agents used for treating obesity include, but are not limited to, orlistat (e.g. ALL1, XENICAL), loracaserin (e.g. BELVIQ), phentermine-topiramate (e.g. QSYMIA), sibutramme (e.g. REDUCTIL or MERJDIA), rimonabant (ACOMPLLA), exenatide (e.g. BYETTA), pramlintide (e.g. SYMLIN) phentermine, benzphetamine, diethylpropion, phendimetrazme, bupropion, and metformin. Agents that interfere with the body's ability to absorb specific nutrients in food are among the additional agents, e.g. orlistat (e.g. ALU, XENICAL), glucomannan, and guar gum. Agents that suppress apetite are also among the additional agents, e.g. catecholamines and their derivatives (such as phenteimine and other amphetamine-based drugs), various antidepressants and mood stabilizers (e.g. bupropion and topiramate), anorectics (e.g. dexedrine, digoxin). Agents that increase the body's metabolism are also among the additional agents.

[0649] In some embodiments, additional therapeutic agents may be selected from among appetite suppressants, neurotransmitter reuptake inhibitors, dopaminergic agonists, serotonergic agonists, modulators of GABAergic signaling, anticonvulsants, antidepressants, monoamine oxidase inhibitors, substance P (NK1) receptor antagonists, melanocortin receptor agonists and antagonists, lipase inhibitors, inhibitors of fat absorption, regulators of energy intake or metabolism, cannabinoid receptor modulators, agents for treating addiction, agents for treating metabolic syndrome, peroxisome proliferator-activated receptor (PPAR) modulators; dipeptidyl peptidase 4 (DPP-4) antagonists, agents for treating cardiovascular disease, agents for treating elevated triglyceride levels, agents for treating low HDL, agents for treating hypercholesterolemia, and agents for treating hypertension. Some agents for cardiovascular disease include statins (e.g. lovastatin, atorvastatin, fluvastatin, rosuvastatin, simvastatin and pravastatin) and omega-3 agents (e.g. LOVAZA, EPANQVA, VASCEPA, esterified omega-3's in general, fish oils, krill oils, algal oils). In some embodiments, additional agents may be selected from among amphetamines, benzodiazepines, suifonyl ureas, meglitinides, thiazolidinediones, biguanides, beta-blockers, XCE inhibitors, diuretics, nitrates, calcium channel blockers, phenlermine, sibutramine, iorcaserin, cetilistat, rimonabant, taranabant, topiramate, gabapentin, valproate, vigabatrin, bupropion, tiagabine, sertraline, fluoxetine, trazodone, zonisamide, methylphenidate, varenicline, naltrexone, diethylpropion, phendimetrazine, rcpaglini.de, nateglinide, glimepiride, metformin, pioglitazone, rosiglilazone, and sitagliptin.

[0650] In some embodiments, the present invention pertains to an agent used for treating diabetes as additional therapeutic agents. Illustrative anti-diabetic agents include, but are not limited to, sulfonylurea (e.g., DYMELOR (acetohexamide), DIABINESE (chlorpropamide), ORINASE (tolbutamide), and TOLINASE (tolazamide), GLUCOTROL (glipizide), GLUCOTROL XL (extended release), DIABETA (glyburide), MICRONASE (glyburide), GLYNASE PRESTAB (glyburide), and AMARYL (glimepiride)); a Biguanide (e.g. metformin (GLUCOPHAGE, GLUCOPHAGE XR, RIOMET, FORTAMET, and GLUMETZA)); a thiazolidinedione (e.g. ACTOS (pioglitazone) and AVANDIA (rosiglitazone); an alpha-glucosidase inhibitor (e.g., PRECOSE (acarbose) and GLYSET (miglitol); a Meglitinide (e.g., PRANDIN (repaglinide) and STARLIX (nateglinide)); a Dipeptidyl peptidase IV (DPP-IV) inhibitor (e.g., JANUVIA (sitagliptin), NESINA (alogliptin), ONGLYZA (saxagliptin), and TRADJENTA (linagliptin); Sodium-glucose co-transporter 2 (SGLT2) inhibitor (e.g. INVOKANA (canaglifozin)); and a combination pill (e.g. GLUCOVANCE, which combines glyburide (a sulfonylurea) and metformin, METAGLIP, which combines glipizide (a sulfonylurea) and metformin, and AVANDAMET, which uses both metformin and rosiglitazone (AVANDIA) in one pill, KAZANO (alogliptin and metformin), OSENI (alogliptin plus pioglitazone), METFORMIN oral, ACTOS oral, BYETTA subcutaneous, JANUVIA oral, WELCHOL oral, JANUMET oral, glipizide oral, glimepiride oral, GLUCOPHAGE oral, LANTUS subcutaneous, glyburide oral, ONGLYZA oral, AMARYI oral, LANTUS SOLOSTAR subcutaneous, BYDUREON subcutaneous, LEVEMIR FLEXPEN subcutaneous, ACTOPLUS MET oral, GLUMETZA oral, TRADJENTA oral, bromocriptine oral, KOMBIGLYZE XR oral, INVOKANA oral, PRANDIN oral, LEVEMIR subcutaneous, PARLODEL oral, pioglitazone oral, NOVOLOG subcutaneous, NOVOLOG FLEXPEN subcutaneous, VICTOZA 2-PAK subcutaneous, HUMALOG subcutaneous, STARLIX oral, FORTAMET oral, GLUCOVANCE oral, GLUCOPHAGE XR oral, NOVOLOG Mix 70-30 FLEXPEN subcutaneous, GLYBURIDE-METFORMIN oral, acarbose oral, SYMLINPEN 60 subcutaneous, GLUCOTROI XL oral, NOVOLIN R inj, GLUCOTROL oral, DUETACT oral, sitagliptin oral, SYMLINPEN 120 subcutaneous, HUMALOG KWIKPEN subcutaneous, JANUMET XR oral, GLIPIZIDE-METFORMIN oral, CYCLOSET oral, HUMALOG MIX 75-25 subcutaneous, nateglinide oral, HUMALOG Mix 75-25 KWIKPEN subcutaneous, HUMULIN 70/30 subcutaneous, PRECOSE oral, APIDRA subcutaneous, Humulin R inj, Jentadueto oral, Victoza 3-Pak subcutaneous, Novolin 70/30 subcutaneous, NOVOLIN N subcutaneous, insulin detemir subcutaneous, glyburide micronized oral, GLYNASE oral, HUMULIN N subcutaneous, insulin glargine subcutaneous, RIOMET oral, pioglitazone-metformin oral, APIDRA SOLOSTAR subcutaneous, insulin lispro subcutaneous, GLYSET oral, HUMULIN 70/30 Pen subcutaneous, colesevelam oral, sitagliptin-metformin oral, DIABETA oral, insulin regular human inj, HUMULIN N Pen subcutaneous, exenatide subcutaneous, HUMALOG Mix 50-50 KWIKPEN subcutaneous, liraglutide subcutaneous, KAZANO oral, repaglinide oral, chlorpropamide oral, insulin aspart subcutaneous, NOVOLOG Mix 70-30 subcutaneous, HUMALOG Mix 50-50 subcutaneous, saxagliptin oral, ACTOPLUS Met XR oral, miglitol oral, NPH insulin human recomb subcutaneous, insulin NPH and regular human subcutaneous, tolazamide oral, mifepristone oral, insulin aspart protam-insulin aspart subcutaneous, repaglinide-metformin oral, saxagliptin-metformin oral, linagliptin-metformin oral, NESINA oral, OSENI oral, tolbutamide oral, insulin lispro protamine and lispro subcutaneous, pramlintide subcutaneous, insulin glulisine subcutaneous, pioglitazone-glimepiride oral, PRANDIMET oral, NOVOLOG PenFill subcutaneous, linagliptin oral, exenatide microspheres subcutaneous, KORLYM oral, alogliptin oral, alogliptin-pioglitazone oral, alogliptin-metformin oral, canagliflozin oral, Lispro (HUMALOG); Aspart (NOVOLOG); Glulisine (APIDRA); Regular (NOVOLIN R or HUMULIN R); NPH (NOVOLIN N or HUMULIN N); Glargine (LANTUS); Detemir (LEVEMIR); HUMULIN or NOVOLIN 70/30; and NOVOLOG Mix 70/30 HUMALOG Mix 75/25 or 50/50.

[0651] In some embodiments, the chimeric proteins or chimeric protein complexes such as Fc-based chimeric protein complex of the present invention act synergistically when used in combination with Chimeric Antigen Receptor (CAR) T-cell therapy. In an illustrative embodiment, the chimeric proteins or chimeric protein complexes such as Fc-based chimeric protein complex acts synergistically when used in combination with CAR T-cell therapy in treating tumor or cancer. In an embodiment, the chimeric proteins or chimeric protein complexes such as Fc-based chimeric protein complex agent acts synergistically when used in combination with CAR T-cell therapy in treating blood-based tumors. In an embodiment, the chimeric proteins or chimeric protein complexes such as Fc-based chimeric protein complex acts synergistically when used in combination with CAR T-cell therapy in treating solid tumors. For example, use of the chimeric proteins or chimeric protein complexes such as Fc-based chimeric protein complex and CAR T-cells may act synergistically to reduce or eliminate the tumor or cancer, or slow the growth and/or progression and/or metastasis of the tumor or cancer. In various embodiments, the chimeric proteins or chimeric protein complexes such as Fc-based chimeric protein complex of the invention induces CAR T-cell division. In various embodiments, the chimeric proteins or chimeric protein complexes such as Fc-based chimeric protein complex of the invention induces CAR T-cell proliferation. In various embodiments, the chimeric proteins or chimeric protein complexes such as Fc-based chimeric protein complex of the invention prevents anergy of the CAR T cells.

[0652] In various embodiments, the CAR T-cell therapy comprises CAR T cells that target antigens (e.g., tumor antigens) such as, but not limited to, carbonic anhydrase IX (CAIX), 5T4, CD19, CD20, CD22, CD30, CD33, CD38, CD47, CS1, CD138, Lewis-Y, L1-CAM, MUC16, ROR-1, IL13Rα2, gp100, prostate stem cell antigen (PSCA), prostate-specific membrane antigen (PSMA), B-cell maturation antigen (BCMA), human papillomavirus type 16 E6 (HPV-16 E6), CD171, folate receptor alpha (FR-α), GD2, human epidermal growth factor receptor 2 (HER2), mesothelin, EGFRvIII, fibroblast activation protein (FAP), carcinoembryonic antigen (CEA), and vascular endothelial growth factor receptor 2 (VEGF-R2), as well as other tumor antigens well known in the art. Additional illustrative tumor antigens include, but are not limited to MART-1/Melan-A, gp100, Dipeptidyl peptidase IV (DPPIV), adenosine deaminase-binding protein (ADAbp), cyclophilin b, Colorectal associated antigen (CRC)-0017-1A/GA733, 20) Carcinoembryonic Antigen (CEA) and its immunogenic epitopes CAP-1 and CAP-2, etv6, aml1, Prostate Specific Antigen (PSA) and its immunogenic epitopes PSA-1, PSA-2, and PSA-3, T-cell receptor/CD3-zeta chain, MAGE-family of tumor antigens (e.g., MAGE-A1, MAGE-A2, MAGE-A3, MAGE-A4, MAGE-A5, MAGE-A6, MAGE-A7, MAGE-A8, MAGE-A9, MAGE-A10, MAGE-A11, MAGE-A12, MAGE-Xp2 (MAGE-B2), MAGE-Xp3 (MAGE-B3), MAGE-Xp4 (MAGE-B4), MAGE-C1, MAGE-C2, MAGE-C3, MAGE-C4, MAGE-C5), GAGE-family of tumor antigens (e.g., GAGE-1, GAGE-2, GAGE-3, GAGE-4, GAGE-5, GAGE-6, GAGE-7, GAGE-8, GAGE-9), BAGE, RAGE, LAGE-1, NAG, GnT-V, MUM-1, CDK4, tyrosinase, p53, MUC family, HER2/neu, p21ras, RCAS1, α-fetoprotein, E-cadherin, α-catenin, β-catenin and γ-catenin, p120ctn, gp 100 Pmel117, PRAME, NY-ESO-1, cdc27, adenomatous polyposis coli protein (APC), fodrin, Connexin 37, Ig-idiotype, p15, gp75, GM2 and GD2 gangliosides, viral products such as human papilloma virus proteins, Smad family of tumor antigens, Imp-1, NA, EBV-encoded nuclear antigen (EBNA)-1, brain glycogen phosphorylase, SSX-1, SSX-2 (HOM-MEL-40), SSX-1, SSX-4, SSX-5, SCP-1 CT-7, c-erbB-2, CD19, CD37, CD56, CD70, CD74, CD138, AGS16, MUC1, GPNMB, Ep-CAM, PD-L1, and PD-L2.

[0653] Illustrative CAR T-cell therapy include, but are not limited to, JCAR014 (Juno Therapeutics), JCAR015 (Juno Therapeutics), JCAR017 (Juno Therapeutics), JCAR018 (Juno Therapeutics), JCAR020 (Juno Therapeutics), JCAR023 (Juno Therapeutics), JCAR024 (Juno Therapeutics), CTL019 (Novartis), KTE-C19 (Kite Pharma), BPX-401 (Bellicum Pharmaceuticals), BPX-501 (Bellicum Pharmaceuticals), BPX-601 (Bellicum Pharmaceuticals), bb2121 (Bluebird Bio), CD-19 Sleeping Beauty cells (Ziopharm Oncology), UCART19 (Cellectis), UCART123 (Cellectis), UCART38 (Cellectis), UCARTCS1 (Cellectis), OXB-302 (Oxford BioMedica, MB-101 (Mustang Bio) and CAR T-cells developed by Innovative Cellular Therapeutics.

[0654] In some embodiments, the chimeric proteins or chimeric protein complexes such as Fc-based chimeric protein complex of the present invention is used in a method of treating multiple sclerosis (MS) in combination with one or more MS therapeutics including, but not limited to, 3-interferons, glatiramer acetate, T-interferon, IFN-β-2 (U.S. Patent Publication No. 2002/0025304), spirogermaniums (e.g., N-(3-dimethylaminopropyl)-2-aza-8,8-dimethyl-8-germanspiro [4:5] decane, N-(3-dimethylaminopropyl)-2-aza-8,8-diethyl-8-germaspiro [4:5] decane, N-(3-dimethylaminopropyl)-2-aza-8,8-dipropyl-8-germaspiro [4:5] decane, and N-(3-dimethylaminopropyl)-2-aza-8, 8-dibutyl-8-germaspiro [4:5] decane), vitamin D analogs (e.g., 1,25 (OH) 2D3, (see, e.g., U.S. Pat. No. 5,716,946)), prostaglandins (e.g., latanoprost, brimonidine, PGE1, PGE2 and PGE3, see, e.g., U.S. Patent Publication No. 2002/0004525), tetracycline and derivatives (e.g., minocycline and doxycycline, see, e.g., U.S. Patent Publication No. 20020022608), a VLA-4 binding antibody (see, e.g., U.S. Patent Publication No. 2009/0202527), adrenocorticotrophic hormone, corticosteroid, prednisone, methylprednisone, 2-chlorodeoxyadenosine, mitoxantrone, sulphasalazine, methotrexate, azathioprine, cyclophosphamide, cyclosporin, fumarate, anti-CD20 antibody (e.g., rituximab), and tizanidine hydrochloride.

[0655] In some embodiments, the chimeric proteins or chimeric protein complexes such as Fc-based chimeric protein complex is used in combination with one or more therapeutic agents that treat one or more symptoms or side effects of MS. Such agents include, but are not limited to, amantadine, baclofen, papaverine, meclizine, hydroxyzine, sulfamethoxazole, ciprofloxacin, docusate, pemoline, dantrolene, desmopressin, dexamethasone, tolterodine, phenyloin, oxybutynin, bisacodyl, venlafaxine, amitriptyline, methenamine, clonazepam, isoniazid, vardenafil, nitrofurantoin, psyllium hydrophilic mucilloid, alprostadil, gabapentin, nortriptyline, paroxetine, propantheline bromide, modafinil, fluoxetine, phenazopyridine, methylprednisolone, carbamazepine, imipramine, diazepam, sildenafil, bupropion, and sertraline.

[0656] In some embodiments, the chimeric proteins or chimeric protein complexes such as Fc-based chimeric protein complex is used in a method of treating multiple sclerosis in combination with one or more of the disease modifying therapies (DMTs) described herein (e.g. the agents of Table 6). In some embodiments, the present invention provides an improved therapeutic effect as compared to use of one or more of the DMTs described herein (e.g. the agents listed in Table 6 below) without the one or more disclosed binding agent. In an embodiment, the combination of the chimeric proteins or chimeric protein complexes such as Fc-based chimeric protein complex and the one or more DMTs produces synergistic therapeutic effects.

[0657] Illustrative disease modifying therapies include, but are not limited to:

TABLE 6

| Generic Name | Branded Name/Company | Frequency/Route of Delivery/Usual Dose |
|---|---|---|
| teriflunomide | AUBAGIO (GENZYME) | Every day; pill taken orally; 7 mg or 14 mg. |
| interferon beta-1a | AVONEX (BIOGEN IDEC) | Once a week; intramuscular (into the muscle) |
| | | injection; 30 mcg |
| interferon beta-1b | BETASERON (BAYER | Every other day; subcutaneous (under the skin) |
| | HEALTHCARE | injection; 250 mcg. |
| | PHARMACEUTICALS, INC.) | |
| glatiramer acetate | COPAXONE (TEVA | Every day; subcutaneous (under the skin) |
| | NEUROSCIENCE) | injection; 20 mg (20,000 mcg) OR Three times a |
| | | week; subcutaneous (under the skin) injection; 40 |
| | | mg (40,000 mcg) |
| interferon beta-1b | EXTAVIA (NOVARTIS | Every other day; subcutaneous (under the skin) |
| | PHARMACEUTICALS CORP.) | injection; 250 mcg. |
| fingolimod | GILENYA (NOVARTIS | Every day; capsule taken orally; 0.5 mg. |
| | PHARMACEUTICALS CORP.) | |
| Alemtuzumab (anti-CD52 | LEMTRADA (GENZYME) | Intravenous infusion on five consecutive days, |
| monoclonal antibody) | | followed by intravenous infusion on three |
| | | consecutive days one year later (12 mg) |
| mitoxantrone | NOVANTRONE (EMD | Four times a year by IV infusion in a medical |
| | SERONO) | facility. Lifetime cumulative dose limit of |
| | | approximately 8-12 doses over 2-3 years (140 |
| | | mg/m2). |
| pegylated interferon beta-1a | PLEGRIDY (BIOGEN IDEC) | Every 14 days; subcutaneous (under the skin) |
| | | injection; 125 mcg |
| interferon beta-1a | REBIF (EMD SERONO, INC.) | Three times a week; subcutaneous (under the |
| | | skin) injection; 44 mcg |
| dimethyl fumarate (BG-12) | TECFIDERA (BIOGEN IDEC) | Twice a day; capsule taken orally; 120 mg for one |
| | | week and 240 mg therafter |
| Natalizumab (humanized | TYSABRI (BIOGEN IDEC) | Every four weeks by IV infusion in a registered |
| monoclonal antibody VLA-4 | | infusion facility; 300 mg |
| antagonist) | | |

DMTs in Development

| | | |
|---|---|---|
| Amiloride (targets Acid- | PAR PHARMACEUTICAL, | Oral |
| sensing ion channel-1 | PERRIGO COMPANY, | |
| Epithelial sodium channel | SIGMAPHARM | |
| Na+/H+ exchanger) | LABORATORIES | |
| ATX-MS-1467 (targets Major | APITOPE/MERCK SERONO | Intradermal Subcutaneous |
| histocompatibility complex | | |
| class II T cell responses to | | |
| myelin basic protein) | | |
| BAF312 (targets | NOVARTIS PHARMA | Oral |
| Sphingosine 1-phosphate | | |
| (S1P) receptor subtypes | | |
| S1P1 and S1P5 B cell | | |
| distrubution T cell | | |
| distribution) | | |
| BGC20-0134 (targets | BTG PLC | Oral |
| Proinflammatory and anti- | | |
| inflammatory cytokines) | | |
| BIIB033 (targets LINGO-1 | BIOGEN | Intravenous infusion used in Phase I and Phase II |
| (“leucine-rich repeat and | | trials Subcutaneous injection used in Phase I trial |
| immunoglobulin-like domain- | | |
| containing, Nogo receptor- | | |
| interacting protein”)) | | |
| Cladribine (targets CD4+ T | MERCK SERONO | Oral |
| cells DNA synthesis and | | |
| repair E-selectin Intracellular | | |
| adhesion molecule-1 Pro- | | |
| inflammatory cytokines | | |
| interleukin 2 and interleukin | | |
| 2R Pro-inflammatory | | |
| cytokines interleukin 8 and | | |
| RANTES Cytokine secretion | | |
| Monocyte and lymphocyte | | |
| migration) | | |
| Cyclophosphamide (targets | BAXTER HEALTHCARE | Oral, monthly intravenous pulses |
| T cells, particularly CD4+ | CORPORATION | |
| helper T cells B cells) | | |
| Daclizumab (humanized | BIOGEN IDEC/ABBVIE | Projected to be IM injection once monthly |
| monoclonal antibody | BIOTHERAPEUTICS | |
| targeting CD25 Immune | | |
| modulator of T cells) | | |
| Dalfampridine (targets | ACORDA THERAPEUTICS/ | One tablet every 12 hours (extended release), 10 |
| Voltage-gated potassium | BIOGEN IDEC | mg twice a day |
| channels | | |
| Degenerin/epithelial sodium | | |
| channels L-type calcium | | |
| channels that contain | | |
| subunit Cavbeta3) | | |
| Dronabinol (targets | ABBVIE INC. | Oral |
| Cannabinoid receptor CB1 | | |
| Cannabinoid receptor CB2) | | |
| Firategrast (targets | GLAXOSMITHKLINE | Oral |
| Alpha4beta1 integrin) | | |
| GNbAC1MSRV-Env (targets | GENEURO SA/SERVIER | Intravenous infusion |
| envelope protein of the MS- | | |
| associated retrovirus) | | |
| Idebenone (targets Reactive | SANTHERA | Oral Dose in clinical trial for PPMS is 2250 mg per |
| oxygen species) | PHARMACEUTICALS | day (750 mg dose, 3 times per day) |
| Imilecleucel-T (targets | OPEXA THERAPEUTICS/ | Subcutaneous Given 5 times per year, according |
| Myelin-specific, autoreactive | MERCK SERONO | to information from the manufacturer |
| T cells) | | |
| Laquinimod | TEVA | Projected to be 0.6 mg or 1.2 mg oral tablet taken |
| | | daily |
| Masitinib (targets KIT (a | AB SCIENCE | Oral |
| stem cell factor, also called | | |
| c-KIT) receptor as well as | | |
| select other tyrosine kinases | | |
| Mast cells) | | |
| MEDI-551 (targets CD19, a | MEDIMMUNE | Intravenous Subcutaneous |
| B cell-specific antigen that is | | |
| part of the B cell receptor | | |
| complex and that functions | | |
| in determining the threshold | | |
| for B cell activation B cells | | |
| Plasmablasts, B cells that | | |
| express CD19 (but not | | |
| CD20) and that secrete large | | |
| quantities of antibodies; | | |
| depletion of plasmablasts | | |
| may be useful in | | |
| autoimmune diseases | | |
| involving pathogenic | | |
| autoantibodies) | | |
| Minocycline (targets T cells | VARIOUS | Oral Available as pellet-filled capsules and an oral |
| Microglia Leukocyte | | suspension |
| migration Matrix | | |
| metalloproteinases) | | |
| MIS416 (targets Innate | INNATE | Intravenous |
| immune system Pathogen- | IMMUNOTHERAPEUTICS | |
| associated molecular pattern | | |
| recognition receptors of the | | |
| innate immune system | | |
| Myeloid cells of the innate | | |
| immune system, which might | | |
| be able to remodel the | | |
| deregulated immune system | | |
| activity that occurs in SPMS) | | |
| Mycophenolate mofetil | MANUFACTURED BY | Oral |
| (targets Purine synthesis) | GENENTECH | |
| Naltrexone (targets Opioid | VARIOUS | Given at low doses (3 to 4.5 mg per day) in oral |
| receptors Toll-like receptor | | form as“Low-dose naltrexone” (or “LDN”) |
| 4) | | |
| Ocrelizumab and | ROCHE/GSK | Projected to be IV infusion |
| Ofatumumab (humanized | | |
| monoclonal antibodies | | |
| targeting CD20 B cell | | |
| suppression | | |
| ONO-4641 (targets | ONO PHARMACEUTICAL CO. | Oral |
| Sphingosine 1-phosphate | | |
| receptor) | | |
| Phenytoin (targets Sodium | PFIZER | Intravenous Intramuscular (less favored option) |
| channels) | | Oral |
| Ponesimod | ACTELION | To be determined |
| Raltegravir (targets | MERCK | Oral 400 mg tablet twice daily, according to |
| Retroviral integrase | | information from the manufacturer |
| Herpesvirus DNA packaging | | |
| terminase) | | |
| RHB-104 | REDHILL BIOPHARMA | 95 mg clarithromycin, 45 mg rifabutin, and 10 mg |
| | LIMITED | clofazimine |
| Riluzole (targets | COVIS PHARMA/SANOFI | Oral |
| Glutamatergic | | |
| neurotransmission | | |
| Glutamate uptake and | | |
| release Voltage-gated | | |
| sodium channels Protein | | |
| kinase C) | | |

[0658] In some embodiments, the present invention relates to combination therapy with a blood transfusion. For instance, the present compositions may supplement a blood transfusion. In some embodiments, the present invention relates to combination therapy with iron supplements.

[0659] In some embodiments, the present invention relates to combination therapy with one or more EPO-based agents. For example, the present compositions may be used as an adjuvant to other EPO-based agents. In some embodiments, the present compositions are used as a maintenance therapy to other EPO-based agents. Other EPO-based agents include the following: epoetin alfa, including without limitation, DARBEPOETIN (ARANESP), EPOCEPT (LUPIN PHARMA), NANOKINE (NANOGEN PHARMACEUTICAL), EPOFIT (INTAS PHARMA), EPOGEN (AMGEN), EPOGIN, EPREX, (JANSSEN-CILAG), BINOCRIT7 (SANDOZ), PROCRIT; epoetin beta, including without limitation, NEORECORMON (HOFFMANN-LA ROCHE), RECORMON, Methoxy polyethylene glycol-epoetin beta (MIRCERA, ROCHE); epoetin delta, including without limitation, DYNEPO (erythropoiesis stimulating protein, SHIRE PLC); epoetin omega, including without limitation, EPOMAX; epoetin zeta, including without limitation, SILAPO (STADA) and RETACRIT (HOSPIRA) and other EPOs, including without limitation, EPOCEPT (LUPIN PHARMACEUTICALS), EPOTRUST (PANACEA BIOTEC LTD), ERYPRO SAFE (BIOCON LTD.), REPOITIN (SERUM INSTITUTE OF INDIA LIMITED), VINTOR (EMCURE PHARMACEUTICALS), EPOFIT (INTAS PHARMA), ERYKINE (INTAS BIOPHARMACEUTICA), WEPOX (WOCKHARDT BIOTECH), ESPOGEN (LG LIFE SCIENCES), RELIPOIETIN (RELIANCE LIFE SCIENCES), SHANPOIETIN (SHANTHA BIOTECHNICS LTD), ZYROP (CADILA HEALTHCARE LTD.), EPIAO (RHUEPO) (SHENYANG SUNSHINE PHARMACEUTICAL CO. LTD), CINNAPOIETIN (CINNAGEN).

[0660] In some embodiments, the present invention relates to combination therapy with one or more immune-modulating agents, for example, without limitation, agents that modulate immune checkpoint. In various embodiments, the immune-modulating agent targets one or more of PD-1, PD-L1, and PD-L2. In various embodiments, the immune-modulating agent is PD-1 inhibitor. In various embodiments, the immune-modulating agent is an antibody specific for one or more of PD-1, PD-L1, and PD-L2. For instance, in some embodiments, the immune-modulating agent is an antibody such as, by way of non-limitation, nivolumab, (ONO-4538/BMS-936558, MDX1106, OPDIVO, BRISTOL MYERS SQUIBB), pembrolizumab (KEYTRUDA, MERCK), pidilizumab (CT-011, CURE TECH), MK-3475 (MERCK), BMS 936559 (BRISTOL MYERS SQUIBB), MPDL3280A (ROCHE). In some embodiments, the immune-modulating agent targets one or more of CD137 or CD137L. In various embodiments, the immune-modulating agent is an antibody specific for one or more of CD137 or CD137L. For instance, in some embodiments, the immune-modulating agent is an antibody such as, by way of non-limitation, urelumab (also known as BMS-663513 and anti-4-1BB antibody). In some embodiments, the present chimeric proteins or chimeric protein complexes such as Fc-based chimeric protein complex is combined with urelumab (optionally with one or more of nivolumab, lirilumab, and urelumab) for the treatment of solid tumors and/or B-cell non-Hodgkins lymphoma and/or head and neck cancer and/or multiple myeloma. In some embodiments, the immune-modulating agent is an agent that targets one or more of CTLA-4, AP2M1, CD80, CD86, SHP-2, and PPP2R5A. In various embodiments, the immune-modulating agent is an antibody specific for one or more of CTLA-4, AP2M1, CD80, CD86, SHP-2, and PPP2R5A. For instance, in some embodiments, the immune-modulating agent is an antibody such as, by way of non-limitation, ipilimumab (MDX-010, MDX-101, Yervoy, BMS) and/or tremelimumab (Pfizer). In some embodiments, the present chimeric proteins or chimeric protein complexes such as Fc-based chimeric protein complex is combined with ipilimumab (optionally with bavituximab) for the treatment of one or more of melanoma, prostate cancer, and lung cancer. In various embodiments, the immune-modulating agent targets CD20. In various embodiments, the immune-modulating agent is an antibody specific CD20. For instance, in some embodiments, the immune-modulating agent is an antibody such as, by way of non-limitation, Ofatumumab (GENMAB), obinutuzumab (GAZYVA), AME-133v (APPLIED MOLECULAR EVOLUTION), Ocrelizumab (GENENTECH), TRU-015 (TRUBION/EMERGENT), veltuzumab (IMMU-106).

[0661] In some embodiments, the present invention relates to combination therapy with one or more chimeric agents described in WO 2013/10779, WO 2015/007536, WO 2015/007520, WO 2015/007542, and WO 2015/007903, the entire contents of which are hereby incorporated by reference in their entireties.

[0662] In some embodiments, the chimeric proteins or chimeric protein complexes such as Fc-based chimeric protein complex described herein, include derivatives that are modified, i.e., by the covalent attachment of any type of molecule to the composition such that covalent attachment does not prevent the activity of the composition. For example, but not by way of limitation, derivatives include composition that have been modified by, inter alia, glycosylation, lipidation, acetylation, pegylation, phosphorylation, amidation, derivatization by known protecting/blocking groups, proteolytic cleavage, linkage to a cellular ligand or other protein, etc. Any of numerous chemical modifications can be carried out by known techniques, including, but not limited to specific chemical cleavage, acetylation, formylation, metabolic synthesis of tunicamycin, etc.

[0663] In still other embodiments, the chimeric proteins or chimeric protein complexes such as Fc-based chimeric protein complex described herein further comprise a cytotoxic agent, comprising, in illustrative embodiments, a toxin, a chemotherapeutic agent, a radioisotope, and an agent that causes apoptosis or cell death. Such agents may be conjugated to a composition described herein.

[0664] The chimeric proteins or chimeric protein complexes such as Fc-based chimeric protein complex described herein may thus be modified post-translationally to add effector moieties such as chemical linkers, detectable moieties such as for example fluorescent dyes, enzymes, substrates, bioluminescent materials, radioactive materials, and chemiluminescent moieties, or functional moieties such as for example streptavidin, avidin, biotin, a cytotoxin, a cytotoxic agent, and radioactive materials.

[0665] Illustrative cytotoxic agents include, but are not limited to, methotrexate, aminopterin, 6-mercaptopurine, 6-thioguanine, cytarabine, 5-fluorouracil decarbazine; alkylating agents such as mechlorethamine, thioepa chlorambucil, melphalan, carmustine (BSNU), mitomycin C, lomustine (CCNU), 1-methylnitrosourea, cyclothosphamide, mechlorethamine, busulfan, dibromomannitol, streptozotocin, mitomycin C, cis-dichlorodiamine platinum (II) (DDP) cisplatin and carboplatin (paraplatin); anthracyclines include daunorubicin (formerly daunomycin), doxorubicin (adriamycin), detorubicin, carminomycin, idarubicin, epirubicin, mitoxantrone and bisantrene; antibiotics include dactinomycin (actinomycin D), bleomycin, calicheamicin, mithramycin, and anthramycin (AMC); and antimytotic agents such as the vinca alkaloids, vincristine and vinblastine. Other cytotoxic agents include paclitaxel (taxol), ricin, pseudomonas exotoxin, gemcitabine, cytochalasin B, gramicidin D, ethidium bromide, emetine, etoposide, tenoposide, colchicin, dihydroxy anthracin dione, 1-dehydrotestosterone, glucocorticoids, procaine, tetracaine, lidocaine, propranolol, puromycin, procarbazine, hydroxyurea, asparaginase, corticosteroids, mytotane (O,P′-(DDD)), interferons, and mixtures of these cytotoxic agents.

[0666] Further cytotoxic agents include, but are not limited to, chemotherapeutic agents such as carboplatin, cisplatin, paclitaxel, gemcitabine, calicheamicin, doxorubicin, 5-fluorouracil, mitomycin C, actinomycin D, cyclophosphamide, vincristine, bleomycin, VEGF antagonists, EGFR antagonists, platins, taxols, irinotecan, 5-fluorouracil, gemcytabine, leucovorine, steroids, cyclophosphamide, melphalan, vinca alkaloids (e.g., vinblastine, vincristine, vindesine and vinorelbine), mustines, tyrosine kinase inhibitors, radiotherapy, sex hormone antagonists, selective androgen receptor modulators, selective estrogen receptor modulators, PDGF antagonists, TNF antagonists, IL-1 antagonists, interleukins (e.g. IL-12 or IL-2), IL-12R antagonists, Toxin conjugated monoclonal antibodies, tumor antigen specific monoclonal antibodies, Erbitux, Avastin, Pertuzumab, anti-CD20 antibodies, Rituxan, ocrelizumab, ofatumumab, DXL625, HERCEPTIN®, or any combination thereof. Toxic enzymes from plants and bacteria such as ricin, diphtheria toxin and Pseudomonas toxin may be conjugated to the therapeutic agents (e.g. antibodies) to generate cell-type-specific-killing reagents (Youle, et al., Proc. Nat'l Acad. Sci. USA 77:5483 (1980); Gilliland, et al., Proc. Nat'l Acad. Sci. USA 77:4539 (1980); Krolick, et al., Proc. Nat'l Acad. Sci. USA 77:5419 (1980).

[0667] Other cytotoxic agents include cytotoxic ribonucleases as described by Goldenberg in U.S. Pat. No. 6,653,104. Embodiments of the invention also relate to radioimmunoconjugates where a radionuclide that emits alpha or beta particles is stably coupled to the chimeric proteins or chimeric protein complexes such as Fc-based chimeric protein complex, with or without the use of a complex-forming agent. Such radionuclides include beta-emitters such as Phosphorus-32, Scandium-47, Copper-67, Gallium-67, Yttrium-88, Yttrium-90, Iodine-125, Iodine-131, Samarium-153, Lutetium-177, Rhenium-186 or Rhenium-188, and alpha-emitters such as Astatine-211, Lead-212, Bismuth-212, Bismuth-213 or Actinium-225.

[0668] Illustrative detectable moieties further include, but are not limited to, horseradish peroxidase, acetylcholinesterase, alkaline phosphatase, beta-galactosidase and luciferase. Further illustrative fluorescent materials include, but are not limited to, rhodamine, fluorescein, fluorescein isothiocyanate, umbelliferone, dichlorotriazinylamine, phycoerythrin and dansyl chloride. Further illustrative chemiluminescent moieties include, but are not limited to, luminol. Further illustrative bioluminescent materials include, but are not limited to, luciferin and aequorin. Further illustrative radioactive materials include, but are not limited to, Iodine-125, Carbon-14, Sulfur-35, Tritium and Phosphorus-32.

### Methods of Treatment

[0669] Methods and compositions described herein have application to treating various diseases and disorders, including, but not limited to cancer, infections, immune disorders, anemia, autoimmune diseases, cardiovascular diseases, wound healing, ischemia-related diseases, neurodegenerative diseases, metabolic diseases and many other diseases and disorders.

[0670] Further, any of the present agents may be for use in the treating, or the manufacture of a medicament for treating, various diseases and disorders, including, but not limited to cancer, infections, immune disorders, inflammatory diseases or conditions, and autoimmune diseases.

[0671] In some embodiments, the present invention relates to the treatment of, or a patient having one or more of chronic granulomatous disease, osteopetrosis, idiopathic pulmonary fibrosis, Friedreich's ataxia, atopic dermatitis, Chagas disease, cancer, heart failure, autoimmune disease, sickle cell disease, thalassemia, blood loss, transfusion reaction, diabetes, vitamin B12 deficiency, collagen vascular disease, Shwachman syndrome, thrombocytopenia purpura, Celiac disease, endocrine deficiency state such as hypothyroidism or Addison's disease, autoimmune disease such as Crohn's Disease, systemic lupus erythematosis, rheumatoid arthritis or juvenile rheumatoid arthritis, ulcerative colitis immune disorders such as eosinophilic fasciitis, hypoimmunoglobulinemia, or thymoma/thymic carcinoma, graft versus host disease, preleukemia, Nonhematologic syndrome (e.g. Down's, Dubowwitz, Seckel), Felty syndrome, hemolytic uremic syndrome, myelodysplasic syndrome, nocturnal paroxysmal hemoglobinuria, osteomyelofibrosis, pancytopenia, pure red-cell aplasia, Schoenlein-Henoch purpura, malaria, protein starvation, menorrhagia, systemic sclerosis, liver cirrhosis, hypometabolic states, and congestive heart failure.

[0672] In some embodiments, the present invention is related to a method for treating cancer, comprising administering an effective amount of i) the chimeric protein, the chimeric protein complex and/or the Fc-based chimeric protein complex to a patient in need thereof; ii) a recombinant nucleic acid encoding the chimeric protein, the chimeric protein complex and/or the Fc-based chimeric protein complex to a patient in need thereof; or iii) a host cell comprising the recombinant nucleic acid encoding the chimeric protein, the chimeric protein complex and/or the Fc-based chimeric protein complex to a patient in need thereof.

[0673] In some embodiments, the present invention relates to the treatment of, or a patient having one or more of chronic granulomatous disease, osteopetrosis, idiopathic pulmonary fibrosis, Friedreich's ataxia, atopic dermatitis, Chagas disease, mycobacterial infections, cancer, scleroderma, hepatitis, hepatitis C, septic shock, and rheumatoid arthritis.

[0674] In some embodiments, the present invention relates to the treatment of, or a patient having cancer. As used herein, cancer refers to any uncontrolled growth of cells that may interfere with the normal functioning of the bodily organs and systems, and includes both primary and metastatic tumors. Primary tumors or cancers that migrate from their original location and seed vital organs can eventually lead to the death of the subject through the functional deterioration of the affected organs. A metastasis is a cancer cell or group of cancer cells, distinct from the primary tumor location, resulting from the dissemination of cancer cells from the primary tumor to other parts of the body. Metastases may eventually result in death of a subject. For example, cancers can include benign and malignant cancers, polyps, hyperplasia, as well as dormant tumors or micrometastases.

[0675] Illustrative cancers that may be treated include, but are not limited to, carcinomas, e.g. various subtypes, including, for example, adenocarcinoma, basal cell carcinoma, squamous cell carcinoma, and transitional cell carcinoma), sarcomas (including, for example, bone and soft tissue), leukemias (including, for example, acute myeloid, acute lymphoblastic, chronic myeloid, chronic lymphocytic, and hairy cell), lymphomas and myelomas (including, for example, Hodgkin and non-Hodgkin lymphomas, light chain, non-secretory, MGUS, and plasmacytomas), and central nervous system cancers (including, for example, brain (e.g. gliomas (e.g. astrocytoma, oligodendroglioma, and ependymoma), meningioma, pituitary adenoma, and neuromas, and spinal cord tumors (e.g. meningiomas and neurofibroma).

[0676] Illustrative cancers that may be treated include, but are not limited to, basal cell carcinoma, biliary tract cancer; bladder cancer; bone cancer; brain and central nervous system cancer; breast cancer; cancer of the peritoneum; cervical cancer; choriocarcinoma; colon and rectum cancer; connective tissue cancer; cancer of the digestive system; endometrial cancer; esophageal cancer; eye cancer; cancer of the head and neck; gastric cancer (including gastrointestinal cancer); glioblastoma; hepatic carcinoma; hepatoma; intra-epithelial neoplasm; kidney or renal cancer; larynx cancer; leukemia; liver cancer; lung cancer (e.g., small-cell lung cancer, non-small cell lung cancer, adenocarcinoma of the lung, and squamous carcinoma of the lung); melanoma; myeloma; neuroblastoma; oral cavity cancer (lip, tongue, mouth, and pharynx); ovarian cancer; pancreatic cancer; prostate cancer; retinoblastoma; rhabdomyosarcoma; rectal cancer; cancer of the respiratory system; salivary gland carcinoma; sarcoma (e.g., Kaposi's sarcoma); skin cancer; squamous cell cancer; stomach cancer; testicular cancer; thyroid cancer; uterine or endometrial cancer; cancer of the urinary system; vulval cancer; lymphoma including Hodgkin's and non-Hodgkin's lymphoma, as well as B-cell lymphoma (including low grade/follicular non-Hodgkin's lymphoma (NHL); small lymphocytic (SL) NHL; intermediate grade/follicular NHL; intermediate grade diffuse NHL; high grade immunoblastic NHL; high grade lymphoblastic NHL; high grade small non-cleaved cell NHL; bulky disease NHL; mantle cell lymphoma; AIDS-related lymphoma; and Waldenstrom's Macroglobulinemia; chronic lymphocytic leukemia (CLL); acute lymphoblastic leukemia (ALL); Hairy cell leukemia; chronic myeloblastic leukemia; as well as other carcinomas and sarcomas; and post-transplant lymphoproliferative disorder (PTLD), as well as abnormal vascular proliferation associated with phakomatoses, edema (e.g. that associated with brain tumors), and Meigs' syndrome. In an embodiment, the present invention relates to the treatment of leukemia including hairy cell leukemia. In another embodiment, the present invention relates to the treatment of melanoma including malignant melanoma. In a further embodiment, the present invention relates to the treatment of Kaposi's sarcoma including AIDS-related Kaposi's sarcoma.

[0677] In some embodiments, the present invention relates to the treatment of, or a patient having a microbial infection and/or chronic infection. Illustrative infections include, but are not limited to, Chagas disease, HIV/AIDS, tuberculosis, osteomyelitis, hepatitis B, hepatitis C, Epstein-Barr virus or parvovirus, T cell leukemia virus, bacterial overgrowth syndrome, fungal or parasitic infections.

[0678] In some embodiments, the present invention relates to the treatment of hepatitis. Illustrative hepatitis that may be treated include, but is not limited to, hepatitis A, hepatitis B, hepatitis C, hepatitis D, hepatitis E, autoimmune hepatitis, alcoholic hepatitis, acute hepatitis, and chronic hepatitis.

[0679] In an illustrative embodiment, the present invention relates to the treatment of chronic hepatitis C. In an embodiment, the chimeric proteins or chimeric protein complexes such as Fc-based chimeric protein complex of the invention may be utilized to treat a patient infected with any one of the hepatitis C genotypes, including genotype 1 (e.g., 1a, 1b), genotype 2 (e.g. 2a, 2b, 2c and 2d), genotype 3 (e.g., 3a, 3b, 3c, 3d, 3e, and 3f), genotype 4 (e.g., 4a, 4b, 4c, 4d, 4e, 4f, 4g, 4h, 4i and 4j), genotype 5a, and genotype 6a.

[0680] In various embodiments, the chimeric proteins or chimeric protein complexes such as Fc-based chimeric protein complex of the invention may be utilized to treat patients who are poorly or non-responsive to standard of care antiviral therapy or who are otherwise difficult to treat with standard of care hepatitis C treatment. In an embodiment, the chimeric proteins or chimeric protein complexes such as Fc-based chimeric protein complex may be utilized to treat a patient who shows low or no response to IL-2 therapy with or without ribavirin. In an embodiment, the chimeric proteins or chimeric protein complexes such as Fc-based chimeric protein complex may be utilized to treat a patient who shows low or no response to combination therapy of pegylated interferon and ribavirin. In an embodiment, the present invention is directed to the treatment of patients infected with hepatitis C genotype 1 or any other genotype who did not respond to previous IL-2 therapy. In an embodiment, the chimeric proteins or chimeric protein complexes such as Fc-based chimeric protein complex of the invention may be used to treat a patient with high baseline viral load (e.g., greater than 800,000 IU/mL). In an embodiment, the chimeric proteins or chimeric protein complexes such as Fc-based chimeric protein complex of the invention may be utilized to treat patients with severe liver damage including those patients with advanced liver fibrosis and/or liver cirrhosis.

[0681] In some embodiments, the present invention relates to the treatment of patients who are naive to antiviral therapy. In other embodiments, the present invention relates to the treatment of patients who did not respond to previous antiviral therapy. In some embodiments, the present chimeric proteins or chimeric protein complexes such as Fc-based chimeric protein complex may be used to treat relapsed patients.

[0682] In some embodiments, the present chimeric proteins or chimeric protein complexes such as Fc-based chimeric protein complex may be effective in treating hepatitis infection in all ethnic groups including white, African-American, Hispanic, and Asian. In an embodiment, the present chimeric proteins or chimeric protein complexes such as Fc-based chimeric protein complex may be particularly effective in treating African-Americans who are otherwise poorly responsive to IL-2 therapy with or without ribavirin.

[0683] In various embodiments, the targeted chimeric proteins or chimeric protein complexes such as Fc-based chimeric protein complex of the invention provides improved safety compared to, e.g., untargeted IFNα1 or an unmodified, wildtype IL-2 or a modified IL-2. In illustrative embodiments, administration of the present chimeric proteins or chimeric protein complexes such as Fc-based chimeric protein complex is associated with minimal side effects (e.g., influenza-like symptoms, myalgia, leucopenia, thrombocytopenia, neutropenia, depression, and weight loss) such as those side effects associated with the use of the untargeted IL-2 or an unmodified, wildtype IL-2 or a modified IL-2.

[0684] In some embodiments, the targeted chimeric proteins or chimeric protein complexes such as Fc-based chimeric protein complex of the invention shows improved therapeutic activity compared to untargeted IL-2 or an unmodified, wildtype IL-2, or a modified IL-2. In some embodiments, the targeted chimeric proteins or chimeric protein complexes such as Fc-based chimeric protein complex of the invention shows improved pharmacokinetic profile (e.g., longer serum half-life and stability) compared to untargeted IL-2 or an unmodified, wildtype IL-2 or a modified IL-2.

[0685] Without wishing to be bound by theory, it is believed that due to such advantageous safety and pharmacokinetic and therapeutic profiles, the present chimeric proteins or chimeric protein complexes such as Fc-based chimeric protein complex may be used to treat patients at high dosages and/or for prolonged periods of time. For example, the present chimeric proteins or chimeric protein complexes such as Fc-based chimeric protein complex may be used at high dosages for initial induction therapy against chronic hepatitis C infection. In another example, the present chimeric proteins or chimeric protein complexes such as Fc-based chimeric protein complex may be used for long-term maintenance therapy to prevent disease relapse.

[0686] In various embodiments, the present compositions are used to treat or prevent one or more inflammatory diseases or conditions, such as inflammation, acute inflammation, chronic inflammation, respiratory disease, atherosclerosis, restenosis, asthma, allergic rhinitis, atopic dermatitis, septic shock, rheumatoid arthritis, inflammatory bowel disease, inflammatory pelvic disease, pain, ocular inflammatory disease, celiac disease, Leigh Syndrome, Glycerol Kinase Deficiency, Familial eosinophilia (FE), autosomal recessive spastic ataxia, laryngeal inflammatory disease; Tuberculosis, Chronic cholecystitis, Bronchiectasis, Silicosis and other pneumoconioses.

[0687] In various embodiments, the present compositions are used to treat or prevent one or more autoimmune diseases or conditions, such as multiple sclerosis, diabetes mellitus, lupus, celiac disease, Crohn's disease, ulcerative colitis, Guillain-Barre syndrome, scleroderms, Goodpasture's syndrome, Wegener's granulomatosis, autoimmune epilepsy, Rasmussen's encephalitis, Primary biliary sclerosis, Sclerosing cholangitis, Autoimmune hepatitis, Addison's disease, Hashimoto's thyroiditis, Fibromyalgia, Menier's syndrome; transplantation rejection (e.g., prevention of allograft rejection) pernicious anemia, rheumatoid arthritis, systemic lupus erythematosus, dermatomyositis, Sjogren's syndrome, lupus erythematosus, multiple sclerosis, myasthenia gravis, Reiter's syndrome, Grave's disease, and other autoimmune diseases.

[0688] In various embodiments, the present compositions are used to treat, control or prevent cardiovascular disease, such as a disease or condition affecting the heart and vasculature, including but not limited to, coronary heart disease (CHD), cerebrovascular disease (CVD), aortic stenosis, peripheral vascular disease, atherosclerosis, arteriosclerosis, myocardial infarction (heart attack), cerebrovascular diseases (stroke), transient ischemic attacks (TIA), angina (stable and unstable), atrial fibrillation, arrhythmia, vavular disease, and/or congestive heart failure.

[0689] In various embodiments, the present compositions are used to treat or prevent one or more metabolic-related disorders. In various embodiments, the present invention is useful for the treatment, controlling or prevention of diabetes, including Type 1 and Type 2 diabetes and diabetes associated with obesity. The compositions and methods of the present invention are useful for the treatment or prevention of diabetes-related disorders, including without limitation diabetic nephropathy, hyperglycemia, impaired glucose tolerance, insulin resistance, obesity, lipid disorders, dyslipidemia, hyperlipidemia, hypertriglyceridemia, hypercholesterolemia, low HDL levels, high LDL levels, atherosclerosis and its sequelae, vascular restenosis, irritable bowel syndrome, inflamatory bowel disease, including Crohn's disease and ulcerative colitis, other inflammatory conditions, pancreatitis, abdominal obesity, neurodegenerative disease, retinopathy, neoplastic conditions, adipose cell tumors, adipose cell carcinomas, such as liposarcoma, prostate cancer and other cancers, including gastric, breast, bladder and colon cancers, angiogenesis, Alzheimer's disease, psoriasis, high blood pressure, Metabolic Syndrome (e.g. a person has three or more of the following disorders: abdominal obesity, hypertriglyceridemia, low HDL cholesterol, high blood pressure, and high fasting plasma glucose), ovarian hyperandrogenism (polycystic ovary syndrome), and other disorders where insulin resistance is a component, such as sleep apnea. The compositions and methods of the present invention are useful for the treatment, control, or prevention of obesity, including genetic or environmental, and obesity-related disorders. The obesity-related disorders herein are associated with, caused by, or result from obesity. Examples of obesity-related disorders include obesity, diabetes, overeating, binge eating, and bulimia, hypertension, elevated plasma insulin concentrations and insulin resistance, dyslipidemia, hyperlipidemia, endometrial, breast, prostate, kidney and colon cancer, osteoarthritis, obstructive sleep apnea, gallstones, heart disease, abnormal heart rhythms and arrythmias, myocardial infarction, congestive heart failure, coronary heart disease, sudden death, stroke, polycystic ovary disease, craniopharyngioma, Prader-Willi Syndrome, Frohlich's syndrome, GH-deficient subjects, normal variant short stature, Turner's syndrome, and other pathological conditions showing reduced metabolic activity or a decrease in resting energy expenditure as a percentage of total fat-free mass, e.g, children with acute lymphoblastic leukemia. Further examples of obesity-related disorders are Metabolic Syndrome, insulin resistance syndrome, reproductive hormone abnormalities, sexual and reproductive dysfunction, such as impaired fertility, infertility, hypogonadism in males and hirsutism in females, fetal defects associated with maternal obesity, gastrointestinal motility disorders, such as obesity-related gastro-esophageal reflux, respiratory disorders, such as obesity-hypoventilation syndrome (Pickwickian syndrome), breathlessness, cardiovascular disorders, inflammation, such as systemic inflammation of the vasculature, arteriosclerosis, hypercholesterolemia, lower back pain, gallbladder disease, hyperuricemia, gout, and kidney cancer, and increased anesthetic risk. The compositions and methods of the present invention are also useful to treat Alzheimer's disease.

[0690] In various embodiments, the present compositions are used to treat or prevent one or more respiratory diseases, such as idiopathic pulmonary fibrosis (IPF), asthma, chronic obstructive pulmonary disease (COPD), bronchiectasis, allergic rhinitis, sinusitis, pulmonary vasoconstriction, inflammation, allergies, impeded respiration, respiratory distress syndrome, cystic fibrosis, pulmonary hypertension, pulmonary vasoconstriction, emphysema, Hantavirus pulmonary syndrome (HPS), Loeffler's syndrome, Goodpasture's syndrome, Pleurisy, pneumonitis, pulmonary edema, pulmonary fibrosis, Sarcoidosis, complications associated with respiratory syncitial virus infection, and other respiratory diseases.

[0691] In some embodiments, the present invention is used to treat or prevent one or more neurodegenerative disease. Illustrative neurodegenerative diseases include, but are not limited to, Friedreich's Ataxia, multiple sclerosis (including without limitation, benign multiple sclerosis; relapsing-remitting multiple sclerosis (RRMS); secondary progressive multiple sclerosis (SPMS); progressive relapsing multiple sclerosis (PRMS); and primary progressive multiple sclerosis (PPMS), Alzheimer's. disease (including, without limitation, Early-onset Alzheimer's, Late-onset Alzheimer's, and Familial Alzheimer's disease (FAD), Parkinson's disease and parkinsonism (including, without limitation, Idiopathic Parkinson's disease, Vascular parkinsonism, Drug-induced parkinsonism, Dementia with Lewy bodies, Inherited Parkinson's, Juvenile Parkinson's), Huntington's disease, Amyotrophic lateral sclerosis (ALS, including, without limitation, Sporadic ALS, Familial ALS, Western Pacific ALS, Juvenile ALS, Hiramaya Disease).

[0692] In various embodiments, the present chimeric proteins or chimeric protein complexes such as Fc-based chimeric protein complex finds use in treating wounds, e.g., a non-healing wound, an ulcer, a burn, or frostbite, a chronic or acute wound, open or closed wound, internal or external wound (illustrative external wounds are penetrating and non-penetrating wound.

[0693] In various embodiments, the present chimeric proteins or chimeric protein complexes such as Fc-based chimeric protein complexes find use in treating ischemia, by way of non-limiting example, ischemia associated with acute coronary syndrome, acute lung injury (ALI), acute myocardial infarction (AMI), acute respiratory distress syndrome (ARDS), arterial occlusive disease, arteriosclerosis, articular cartilage defect, aseptic systemic inflammation, atherosclerotic cardiovascular disease, autoimmune disease, bone fracture, bone fracture, brain edema, brain hypoperfusion, Buerger's disease, burns, cancer, cardiovascular disease, cartilage damage, cerebral infarct, cerebral ischemia, cerebral stroke, cerebrovascular disease, chemotherapy-induced neuropathy, chronic infection, chronic mesenteric ischemia, claudication, congestive heart failure, connective tissue damage, contusion, coronary artery disease (CAD), critical limb ischemia (CLI), Crohn's disease, deep vein thrombosis, deep wound, delayed ulcer healing, delayed wound-healing, diabetes (type I and type II), diabetic neuropathy, diabetes induced ischemia, disseminated intravascular coagulation (DIC), embolic brain ischemia, frostbite, graft-versus-host disease, hereditary hemorrhagic telengiectasiaischemic vascular disease, hyperoxic injury, hypoxia, inflammation, inflammatory bowel disease, inflammatory disease, injured tendons, intermittent claudication, intestinal ischemia, ischemia, ischemic brain disease, ischemic heart disease, ischemic peripheral vascular disease, ischemic placenta, ischemic renal disease, ischemic vascular disease, ischemic-reperfusion injury, laceration, left main coronary artery disease, limb ischemia, lower extremity ischemia, myocardial infarction, myocardial ischemia, organ ischemia, osteoarthritis, osteoporosis, osteosarcoma, Parkinson's disease, peripheral arterial disease (PAD), peripheral artery disease, peripheral ischemia, peripheral neuropathy, peripheral vascular disease, pre-cancer, pulmonary edema, pulmonary embolism, remodeling disorder, renal ischemia, retinal ischemia, retinopathy, sepsis, skin ulcers, solid organ transplantation, spinal cord injury, stroke, subchondral-bone cyst, thrombosis, thrombotic brain ischemia, tissue ischemia, transient ischemic attack (TIA), traumatic brain injury, ulcerative colitis, vascular disease of the kidney, vascular inflammatory conditions, von Hippel-Lindau syndrome, or wounds to tissues or organs

[0694] In various embodiments, the present invention relates to the treatment of one or more of anemia, including anemia resulting from chronic kidney disease (e.g. from dialysis) and/or an anti-cancer agent (e.g. chemotherapy and/or HIV treatment (e.g. Zidovudine (INN) or azidothymidine (AZT)), inflammatory bowel disease (e.g. Crohn's disease and ulcer colitis), anemia linked to inflammatory conditions (e.g. arthritis, lupus, IBD), anemia linked to diabetes, schizophrenia, cerebral malaria, as aplastic anemia, and myelodysplasia from the treatment of cancer (e.g. chemotherapy and/or radiation), and various myelodysplastic syndrome diseases (e.g. sickle cell anemia, hemoglobin SC disease, hemoglobin C disease, alpha- and beta-thalassemias, neonatal anemia after premature birth, and comparable conditions).

[0695] In some embodiments, the present invention relates to the treatment of, or a patient having anemia, i.e. a condition in which the number of red blood cells and/or the amount of hemoglobin found in the red blood cells is below normal. In various embodiments, the anemia may be acute or chronic. For example, the present anemias include but are not limited to iron deficiency anemia, renal anemia, anemia of chronic diseases/inflammation, pernicious anemia such as macrocytic achylic anemia, juvenile pernicious anemia and congenital pernicious anemia, cancer-related anemia, anti-cancer-related anemia (e.g. chemotherapy-related anemia, radiotherapy-related anemia), pure red cell aplasia, refractory anemia with excess of blasts, aplastic anemia, X-lined siderobalstic anemia, hemolytic anemia, sickle cell anemia, anemia caused by impaired production of ESA, myelodysplasia syndromes, hypochromic anemia, microcytic anemia, sideroblastic anemia, autoimmune hemolytic anemia, Cooley's anemia, Mediterranean anemia, Diamond Blackfan anemia, Fanconi's anemia and drug-induced immune hemolytic anemia. Anemia may cause serious symptoms, including hypoxia, chronic fatigue, lack of concentration, pale skin, low blood pressure, dizziness and heart failure.

[0696] In some embodiments, the present invention relates to the treatment of anemia resulting from chronic renal failure. In some embodiments, the present invention relates to the treatment of anemia resulting from the use of one or more renal replacement therapies, inclusive of dialysis, hemodialysis, peritoneal dialysis, hemofiltration, hemodiafiltration, and renal transplantation.

[0697] In some embodiments, the present invention relates to the treatment of anemia in patients with chronic kidney disease who are not on dialysis. For instance, the present invention relates to patients in stage 1 CKD, or stage 2 CKD, or stage 3 CKD, or stage 4 CKD, or stage 5 CKD. In some embodiments, the present patient is stage 4 CKD or stage 5 CKD. In some embodiments, the present patient has undergone a kidney transplant. In some embodiments, the present invention relates to the treatment of anemia is a patient having an acute kidney injury (AKI).

[0698] In some embodiments, the anemia is induced by chemotherapy. For instance, the chemotherapy may be any myelosuppressive chemotherapy. In some embodiment, the chemotherapy is one or more of Revlimid, Thalomid, dexamethasone, Adriamycin and Doxil. In some embodiments, the chemotherapy is one or more platinum-based drugs including cisplatin (e.g. PLATINOL) and carboplatin (e.g. PARAPLATIN). In some embodiments, the chemotherapy is any one of the chemotherapeutic agents described herein. In some embodiments, the chemotherapy is any agent described in Groopman et al. J Natl Cancer Inst (1999) 91 (19): 1616-1634, the contents of which are hereby incorporated by reference in their entireties. In some embodiments, the present compositions and methods are used in the treatment of chemotherapy-related anemia in later stage cancer patients (e.g. a stage IV, or stage III, or stage II cancer). In some embodiments, the present compositions and methods are used in the treatment of chemotherapy-related anemia in cancer patients receiving dose-dense chemotherapy or other aggressive chemotherapy regimens.

[0699] In some embodiments, the present invention relates to the treatment of anemia in a patient having one or more blood-based cancers, such as leukemia, lymphoma, and multiple myeloma. Such cancers may affect the bone marrow directly. Further, the present invention relates to metastatic cancer that has spread to the bone or bone marrow. In some embodiments, the present invention relates to the treatment of anemia in a patient undergoing radiation therapy. Such radiation therapy may damage the bone marrow, lowering its ability to make red blood cells. In further embodiments, the present invention relates to the treatment of anemia in a patient having a reduction or deficiency of one or more of iron, vitamin B12, and folic acid. In further embodiments, the present invention relates to the treatment of anemia in a patient having excessive bleeding including without limitation, after surgery or from a tumor that is causing internal bleeding. In further embodiments, the present invention relates to the treatment of anemia in a patient having anemia of chronic disease.

[0700] In some embodiments, the present methods and compositions stimulate red blood cell production. In some embodiments, the present methods and compositions stimulate division and differentiation of committed erythroid progenitors in the bone marrow.

[0701] Certain embodiments of the present invention are particularly useful for treating chemotherapy-induced anemia in cancer patients. In some embodiments, the present methods and compositions allows for continued administration of the chimeric proteins or chimeric protein complexes such as Fc-based chimeric protein complex after a cancer patient's chemotherapy is finished. In some embodiments, the present methods and compositions allows for treatment of a cancer patient without dose reduction relative to a non-cancer patient. In some embodiments, the present methods and compositions allows for treatment of a cancer patient receiving chemotherapy and considered curable. In various embodiments, the cancer patient has one or more of a history of blood clots, recent surgery, prolonged periods of bed rest or limited activity, and treatment with a chemotherapeutic agent.

### Kits

[0702] The invention also provides kits for the administration of any agent described herein (e.g. the chimeric proteins or chimeric protein complexes, such as Fc-based chimeric protein complexes, with or without various additional therapeutic agents). The kit is an assemblage of materials or components, including at least one of the inventive pharmaceutical compositions described herein. Thus, in some embodiments, the kit contains at least one of the pharmaceutical compositions described herein.

[0703] The exact nature of the components configured in the kit depends on its intended purpose. In one embodiment, the kit is configured for the purpose of treating human subjects.

[0704] Instructions for use may be included in the kit. Instructions for use typically include a tangible expression describing the technique to be employed in using the components of the kit to effect a desired outcome, such as to treat cancer. Optionally, the kit also contains other useful components, such as, diluents, buffers, pharmaceutically acceptable carriers, syringes, catheters, applicators, pipetting or measuring tools, bandaging materials or other useful paraphernalia as will be readily recognized by those of skill in the art.

[0705] The materials and components assembled in the kit can be provided to the practitioner stored in any convenience and suitable ways that preserve their operability and utility. For example, the components can be provided at room, refrigerated or frozen temperatures. The components are typically contained in suitable packaging materials. In various embodiments, the packaging material is constructed by well-known methods, preferably to provide a sterile, contaminant-free environment. The packaging material may have an external label which indicates the contents and/or purpose of the kit and/or its components.

### Definitions

[0706] Throughout the application, a chimeric protein or protein complex of the present invention may be indicated by the term “AcTaleukin-2” and/or “ALN2”.

[0707] As used herein, “a,” “an,” or “the” can mean one or more than one.

[0708] Unless specifically stated or obvious from context, as used herein, the term “or” is understood to be inclusive and covers both “or” and “and”.

[0709] Further, the term “about” when used in connection with a referenced numeric indication means the referenced numeric indication plus or minus up to 10% of that referenced numeric indication, e.g., within (plus or minus) 10%, 9%, 8%, 7%, 6%, 5%, 4%, 3%, 2%, 1%, 0.5%, 0.1%, 0.05%, or 0.01% of the stated value. For example, the language “about 50” covers the range of 45 to 55.

[0710] An “effective amount,” when used in connection with medical uses is an amount that is effective for providing a measurable treatment, prevention, or reduction in the rate of pathogenesis of a disease of interest.

[0711] As used herein, something is “decreased” if a read-out of activity and/or effect is reduced by a significant amount, such as by at least about 10%, at least about 20%, at least about 30%, at least about 40%, at least about 50%, at least about 60%, at least about 70%, at least about 80%, at least about 90%, at least about 95%, at least about 97%, at least about 98%, or more, up to and including at least about 100%, in the presence of an agent or stimulus relative to the absence of such modulation. As will be understood by one of ordinary skill in the art, in some embodiments, activity is decreased and some downstream read-outs will decrease but others can increase.

[0712] Conversely, activity is “increased” if a read-out of activity and/or effect is increased by a significant amount, for example by at least about 10%, at least about 20%, at least about 30%, at least about 40%, at least about 50%, at least about 60%, at least about 70%, at least about 80%, at least about 90%, at least about 95%, at least about 97%, at least about 98%, or more, up to and including at least about 100% or more, at least about 2-fold, at least about 3-fold, at least about 4-fold, at least about 5-fold, at least about 6-fold, at least about 7-fold, at least about 8-fold, at least about 9-fold, at least about 10-fold, at least about 50-fold, at least about 100-fold, in the presence of an agent or stimulus, relative to the absence of such agent or stimulus.

[0713] As referred to herein, all compositional percentages are by weight of the total composition, unless otherwise specified. As used herein, the word “include,” and its variants, is intended to be non-limiting, such that recitation of items in a list is not to the exclusion of other like items that may also be useful in the compositions and methods of this technology. Similarly, the terms “can” and “may” and their variants are intended to be non-limiting, such that recitation that an embodiment can or may comprise certain elements or features does not exclude other embodiments of the present technology that do not contain those elements or features.

[0714] Although the open-ended term “comprising,” as a synonym of terms such as including, containing, or having, is used herein to describe and claim the invention, the present invention, or embodiments thereof, may alternatively be described using alternative terms such as “consisting of” or “consisting essentially of.”

[0715] As used herein, the words “preferred” and “preferably” refer to embodiments of the technology that afford certain benefits, under certain circumstances. However, other embodiments may also be preferred, under the same or other circumstances. Furthermore, the recitation of one or more preferred embodiments does not imply that other embodiments are not useful, and is not intended to exclude other embodiments from the scope of the technology.

[0716] The amount of compositions described herein needed for achieving a therapeutic effect may be determined empirically in accordance with conventional procedures for the particular purpose. Generally, for administering therapeutic agents for therapeutic purposes, the therapeutic agents are given at a pharmacologically effective dose. A “pharmacologically effective amount,” “pharmacologically effective dose,” “therapeutically effective amount,” or “effective amount” refers to an amount sufficient to produce the desired physiological effect or amount capable of achieving the desired result, particularly for treating the disorder or disease. An effective amount as used herein would include an amount sufficient to, for example, delay the development of a symptom of the disorder or disease, alter the course of a symptom of the disorder or disease (e.g., slow the progression of a symptom of the disease), reduce or eliminate one or more symptoms or manifestations of the disorder or disease, and reverse a symptom of a disorder or disease. Therapeutic benefit also includes halting or slowing the progression of the underlying disease or disorder, regardless of whether improvement is realized.

[0717] Effective amounts, toxicity, and therapeutic efficacy can be determined by standard pharmaceutical procedures in cell cultures or experimental animals, e.g., for determining the LD50 (the dose lethal to about 50% of the population) and the ED50 (the dose therapeutically effective in about 50% of the population). The dosage can vary depending upon the dosage form employed and the route of administration utilized. The dose ratio between toxic and therapeutic effects is the therapeutic index and can be expressed as the ratio LD50/ED50. In some embodiments, compositions and methods that exhibit large therapeutic indices are preferred. A therapeutically effective dose can be estimated initially from in vitro assays, including, for example, cell culture assays. Also, a dose can be formulated in animal models to achieve a circulating plasma concentration range that includes the IC50 as determined in cell culture, or in an appropriate animal model. Levels of the described compositions in plasma can be measured, for example, by high performance liquid chromatography. The effects of any particular dosage can be monitored by a suitable bioassay. The dosage can be determined by a physician and adjusted, as necessary, to suit observed effects of the treatment.

[0718] In certain embodiments, the effect will result in a quantifiable change of at least about 10%, at least about 20%, at least about 30%, at least about 50%, at least about 70%, or at least about 90%. In some embodiments, the effect will result in a quantifiable change of about 10%, about 20%, about 30%, about 50%, about 70%, or even about 90% or more. Therapeutic benefit also includes halting or slowing the progression of the underlying disease or disorder, regardless of whether improvement is realized.

[0719] As used herein, “methods of treatment” are equally applicable to use of a composition for treating the diseases or disorders described herein and/or compositions for use and/or uses in the manufacture of a medicaments for treating the diseases or disorders described herein. This invention is further illustrated by the following non-limiting examples.

### EXAMPLES

[0720] For the purposes of the following Examples, and throughout the application, a chimeric protein or protein complex of the present invention may be indicated by the term “AcTaleukin-2” and/or “ALN2”.

### Example 1: IL-2 and Fc-IL-2 Drive STAT5 Phosphorylation in Peripheral Blood Mononuclear Cells (PBMCs)

[0721] This Example describes how Interleukin-2 (IL-2) can be modified in such a way that only targeted cells are activated, and cells with negative or adverse effects are no longer activated. In this example, anti-tumor activities of CD8 expressing T cells (e.g. cytotoxic T cells or CTLs) were boosted, while immune-suppressing functions of regulatory T cells (Tregs) were restricted. This uncoupling of cellular functions can, in part, be achieved based on the use of IL-2 receptors (IL-2R) in these cells: while signaling in CTLs is mediated by an intermediate-affinity IL-2R complex composed of the IL-2Rβ (CD122) and γ common (γc; CD132) chains, in T_{regs} the high-affinity IL-2R complex additionally includes an IL-2Rα (CD25) chain. The strategy for development of CTL-specific IL-2 activity includes: (i) CD8 targeting, (ii) elimination of the CD25 binding and thus involvement of this receptor in signaling, and (iii) the selection of a loss-of-function beta- and gamma-mutations that can be restored upon (CD8) targeting.

[0722] First, the effect of Fc-fusion on the activity of IL-2 was examined. To this end, the cytokine was cloned (in the pcDNA3.4 vector) via a flexible 20*GGS-linker C-terminally to a heterodimeric, ‘knob-in-hole’ human IgG1 Fc backbone. Fc sequences contained the L234A_L235A_K322Q effector mutations and the ‘hole’ modifications Y349C_T366S_L368A_Y407V (in sequence hFc3) or ‘knob’ mutations S354C_T366W (in sequence hFc4-hIL-2_C125A). For stability and manufacturability reasons, the free cysteine on position 125 in IL-2 was mutated to an alanine (C125A)

[0723] To produce this ‘knob-in-hole’ Fc-IL-2, a combination of both ‘hole’ and ‘knob’ plasmids was transfected in ExpiCHO cells (ThermoFisher) according to the manufacturer's instructions. Seven days post transfection, recombinant proteins were purified using protein A spin plates (ThermoFisher), quantified and purity tested using SDS-PAGE.

[0724] Resulting AcTaleukin-2 (ALN2) was tested for STAT5 phosphorylation in (i) CD8 positive T cells (CD8⁺); (ii) CD25 negative conventional T cells (CD25− Tconv); (iii) CD25 positive conventional T cells (CD25⁺ Tconv); or (iv) regulatory T cells (Treg) defined as CD4⁺CD25+FoxP3+. In brief, PBMCs from buffy coats of healthy donors were isolated using density gradient centrifugation using Lymphoprep (StemCell technologies). Cells were stimulated with a serial dilution wild type recombinant IL-2 or Fc-IL-2 for 30 minutes at 37° C. After centrifugation, cells were resuspended in Lyse/Fix buffer (BD Biosciences) and further incubated for 10 minutes at 37° C. Cells were washed and incubated with human FcR Blocking Reagent (Miltenyi Biotec) and stained with anti-CD25 and anti-CD8 for 30 minutes at room temperature. Cells were subsequently permeabilized using the Perm Buffer III (BD Biosciences) at 4ºC for 30 minutes. Cells were finally stained with anti-CD3, anti-CD4, anti-FoxP3, and anti-pSTAT5 for 1 hour. Samples were acquired on a MACSQuant X instrument (Miltenyi Biotec) and analyzed using the FlowLogic software (Miltenyi Biotec).

[0725] FIG. 20 illustrates that (i) the Treg cells are much more sensitive to IL-2 compared to other cell-types, and (ii) that Fc-fusion affects signaling in all tested populations. As an example, Fc-IL-2 is +20-fold less active than IL-2 on Tregs and the fusion is hardly active on CD8 positive cells.

### Example 2: CD25 Knock Out Diminishes Fc-IL-2 Signaling in all Cell Types

[0726] This Example examined the effect of five mutant combinations that are described to reduce CD25 binding on the behavior of the Fc-IL-2 fusion: (i) R38A_F42Y_Y45A_E62A; (ii) F42Y_Y45A_L72G; (iii) F42K; (iv) R38A_F42K; and (v) E61Q.

[0727] These residues were mutated in the hFc4-hIL-2_C125A construct (see resulting sequences below). These knob constructs were combined with the hole-fusion hCD8 VHH-hFc3, in which hCD8 VHH 1CDA65 sequence was fused via a 20*GGS-linker to the Fc with hole mutations (sequence below), which allows for the evaluation of the CD8 targeting efficiency. A combination of plasmids was transfected in ExpiCHO and purified as described above. Resulting proteins were tested for STAT5 phosphorylation in the different lymphocyte populations (FIGS. 21A-G). Data illustrate that reducing the CD25 interaction (e.g., via the R38A_F42K mutation) affects signaling in all sub-populations, and this effect is independent of the presence of CD25 (FIGS. 21A-B). This likely illustrates that the CD25 mutations not only directly affect CD25 binding, but also have some conformational effects. If the CD25 knock-out mutant is targeted to CD8 expressing cells using the CD8 VHH, there is a clear increase of signaling in these cells, while signaling in other cell-types remains mostly unaltered (FIGS. 21C-G). An exception is seen for the E61Q mutations (FIG. 21G) for which the attenuation is only modest compared to the other four variants.

[0728] Bio-layer interferometry (BLI) on an Octet RED96 instrument (ForteBio) was also used to show that the CD25 mutations indeed reduce binding to CD25. In brief, recombinant CD25 (Acro Biosystems) was biotinylated using the Pierce Antibody Biotinylation Kit for IP and loaded on Streptavidin sensors. Association and dissociation of seven concentrations of wild type IL-2, Fc-IL-2 or Fc-ALN2 with mutated CD25 binding-site (all CD8 targeted) were monitored and used to calculate the association and dissociation constants and hence affinity (FIGS. 22A-G). Fusion to a Fc appears not to affect binding of IL-2 to CD25 and suggests that the loss in activity observed in Example 1 is due to a less efficient binding to IL-2Rβ and/or IL-2Rγ. chains. On the other hand, the combination mutations R38A_F42Y_Y45A_E62A; F42Y_Y45A_L72G; F42K; and R38A_F42K completely abolish detectable CD25 binding (i.e., no specific binding could be measured). Also, here the effect of mutation E61Q is only modest and explains the more potent STAT5 phosphorylation described earlier.

[0729] In conclusion, CD25 knock-out mutations diminish IL-2 signaling in all cell-types (independent of CD25 expression), and CD8 targeting partly restores signaling in CD8 expressing cells. However, such ALN2 molecules with mutated CD25 binding-site still clearly signal in Treg cells with an EC50 of 50 to 250 ng/ml.

### Example 3: Identification of Modified IL-2 Having Mutations of Residues Involved in IL-2Rβ Binding

[0730] Previous experiments illustrated that mutation of the CD25 binding-site results in an attenuation in signaling, and that CD8 targeting, at least in part, restores this loss in signaling. Resulting ALN2 variants were still able to induce STAT5 phosphorylation in the hyper-sensitive Treg cells. To further reduce this latter signaling (and thus the CD8-selectivity of ALN2 activity), an option of a restorable (upon targeting) loss-of-function mutation of residues involved in IL-2Rβ binding was examined.

[0731] Candidate residues D20 and N88 were mutated to any other amino acid (excluding C and M) in the hFc4-hIL-2_C125A construct (see sequences below). Resulting constructs were combined with CD8-hFc3 for expression in ExpiCHO. Recombinant proteins were purified from the supernatant using protein A spin plates (ThermoFisher), quantified and purity tested using SDS-PAGE.

[0732] Resulting ALN2 variants were tested for STAT5 phosphorylation in CD8⁺, CD4⁺CD25, and CD4⁺CD25⁺ PBMC populations as follows: PBMCs were blocked human FcR Blocking Reagent (Miltenyi Biotec) and stained fluorescently labelled Ab's specific for CD4, CD8, and CD25. After staining and washing, cells were stimulated with a serial dilution ALN2 variants as indicated for 30 min at 37° C. Cells were subsequently fixed with Lyse/Fix buffer (BD Biosciences) and permeabilized using the Perm Buffer III (BD Biosciences) according to the manufacturer's guidelines. After overnight staining with a pSTAT5 specific Ab, samples were analyzed on a MACSQuant X instrument (Miltenyi Biotec) and analyzed using the FlowLogic software (Miltenyi Biotec).

[0733] FIGS. 23A-R (screening of D20 mutants) and FIGS. 24A-R (screening of N88 mutants) illustrate that most mutations have a drastic effect on the pSTAT5 outcome. Variants that retained most activity (compared to wild type) were D20E, D20V, N88A, N88G (and to a lesser extent D20S, D20T, N88D, N88Q, N88H, and N88T) with EC50 values between 3 and 18 ng/ml. Data also clearly illustrate that even with a mutation of the IL-2Rβ site and CD8 targeting, clear pSTAT5 can be detected at concentrations of 1 μg/ml in the CD4⁺CD25⁺ population, of which the hyper-sensitive Tregs are very small portion.

[0734] Then, the effect of the beta mutations (here N88G as an example) on STAT5 phosphorylation was evaluated in CD8⁺, CD25⁻ Tconv, CD25⁺ Tconv and Treg cells. Therefore, wild type IL-2 or IL-2_N88G (both with the C125A) were expressed as untargeted (combination with hFc3) or CD8 targeted (combination with CD8 VHH-hFc3) as heterodimeric Fc fusion-proteins. Production, purification and pSTAT5 in PBMCs were performed as described in Example 1. The results shown in FIGS. 25A-D clearly illustrate that the N88 mutation diminishes signaling in all PBMC populations (FIG. 25A vs FIG. 25C), and that CD8 targeting increases signaling in antigen expressing cells, while pSTAT5 in other sub-populations remains mostly unaffected (FIG. 25A vs FIG. 25B and FIG. 25C vs FIG. 25D).

### Example 4: Combination of CD25 Knock-Out and Beta Mutations

[0735] The purpose of this Example was to combine CD25 knock-out mutations (e.g., R38A_F42K) with the best performing IL-2Rβ-mutations (e.g., D20E, D20V, N88A and N88G). Resulting constructs (see below for sequences) were combined with the CD8 VHH-hFc3 partner and tested for STAT5 phosphorylation in CD8⁺, CD25⁻ Tconv, CD25⁺ Tconv and Treg cells as described in Example 1. Data in FIGS. 26A-J and summary Table 7 illustrate that:
[0736] i. CD25 knock-out (e.g., R38A_K42K) mutations affect signaling in all sub-populations independent of CD25 expression (FIG. 26A and FIG. 26F).
[0737] ii. IL-2Rβ mutations (e.g., D20E, D20V, N88A, N88G) also affect signaling in all sub-populations.
[0738] iii. On CD8 positive cells, EC50 values for variants with mutated CD25 or combination mutation of CD25 and beta-sites are comparable, suggesting that CD8 targeting compensates for the loss in signaling due to the beta mutation (FIG. 26B vs FIG. 26G, FIG. 26C vs FIG. 26H, FIG. 26D vs FIG. 26I, and FIG. 26E vs FIG. 26J).
[0739] iv. Although with reduced efficacy, ALN2 variants with mutated CD25 or IL-2Rβ binding-sites still clearly signal in Treg cells (FIG. 26B, FIG. 26C, FIG. 26D, FIG. 26E, and FIG. 26F).
[0740] v. A combination of CD25 and IL-2Rβ mutations is needed to almost abolish completely signaling in the hyper-sensitive Treg cells (FIGS. 26G-J).
[0741] vi. This combination of CD25 binding reduction and selected IL-2Rβ mutations and targeting to CD8, finally resulted in up to a 2000-fold specificity CD8⁺ over Tregs (FIG. 26F, FIG. 26G, FIG. 26I, and FIG. 26J).

TABLE 7
With reference to panels depicted in FIGS. 26A-J, EC₅₀ (in pM; extrapolated if necessary)
of combination of CD25 and IL-2Rβ mutations and their effect on pSTAT5 in PMBCs populations

| | | | CD25− | | CD25+ | Ratio CD8+ |
|---|---|---|---|---|---|---|
| Panel | ALN2 variant | CD8+ | Tconv | Treg | Tconv | over Treg |
| A | CD8 VHH-hFc3 + hFc4-hIL-2_C125A | 0.4057 | 5498 | 0.08581 | 10.92 | 0.21 |
| B | CD8 VHH-hFc3 + hFc4-hIL-2_D20E_C125A | 41.13 | ~ | 27.03 | 770.3 | 0.66 |
| C | CD8 VHH-hFc3 + hFc4-hIL-2_D20V_C125A | 49021 | ~ | 14980 | 293171 | 0.31 |
| D | CD8 VHH-hFc3 + hFc4-hIL-2_N88A_C125A | 134.5 | ~ | 114 | 2333 | 0.85 |
| E | CD8 VHH-hFc3 + hFc4-hIL-2_N88G_C125A | 237.5 | ~ | 135.2 | 4860 | 0.57 |
| F | CD8 VHH-hFc3 + hFc4-hIL-2_R38A_F42K_C125A | 1.041 | ~ | 1865 | 19248 | 1791.55 |
| G | CD8 VHH-hFc3 + hFc4-hIL-2_R38A_F42K_{——}D20E_C125A | 57.56 | ~ | 55529 | 140458 | 964.72 |
| H | CD8 VHH-hFc3 + hFc4-hIL-2_R38A_F42K_D20V_C125A | 662.7 | ~ | ~ | ~ | ND |
| I | CD8 VHH-hFc3 + hFc4-hIL-2_R38A_F42K_{——}N88A_C125A | 124.1 | ~ | 147584 | ~ | 1189.23 |
| J | CD8 VHH-hFc3 + hFc4-hIL-2_R38A_F42K_N88G_C125A | 333.8 | ~ | 241760 | ~ | 724.27 |

~: an accurate EC₅₀ could not be determined

[0742] In conclusion, Treg cells are on average 100,000-fold more sensitive to wild type IL-2 compared to CD8⁺ T cells. A combination of CD8-targeting, CD25-binding knock-out, and selected recoverable IL-2Rβ mutations resulted in an ALN2 molecule with a specificity of 1,000-fold in favor of the CD8 expressing cells and no detectable Treg activity up to 1,000 or even 10,000 pM which equals concentrations of about 0.1-1 μg/ml. Of note IL-2 molecules with only IL-2Rα mutations already display maximal activation of Tregs at 10,000 pM (FIGS. 26A-J).

### Example 5: CD25 Targeting of IL-2 Activity

[0743] In the context of autoimmune diseases, it is believed that it may be desirable to specifically activate (e.g. through IL-2) Treg cells while leaving other (IL-2) responsive cells untouched. This example explored the possibility to activate Tregs with modified IL-2 molecules that are targeted to the CD25 receptor which is highly expressed on these cells. As targeting domains, scFv variants of two non-neutralizing anti-CD25 antibodies (MA251 and 7G7B6) were chosen. To this end, VH and VL sequences were fused via a 3*GGGGS-liner in two orientations (VH-VL and VL-VH) and linked to the hFc3 sequence with effector and hole mutations (see sequences below). Resulting constructs were combined with a hFc4 expressing plasmid (in order to generate unarmed knob-in-hole Fc constructs) for production in ExpiCHO cells. Resulting proteins were purified as described above and initially tested for (i) binding to CD25 expressing cells, and (ii) for neutralization of IL-2 signaling. For binding, two HEK derived cell-lines HEK-Blue-IL-2 (expressing a functional IL-2R; InvivoGen) and HEK-Blue-IL-1 (expressing a functional IL-1R; InvivoGen) were incubated with a serial dilution of MA251 and 7G7B6 scFv unarmed proteins for 2 hours at 4ºC. Binding was measured using a fluorescently labeled anti-human Ab in FACS. Samples were acquired on a MACSQuant X instrument (Miltenyi Biotec) and analyzed using the FlowLogic software (Miltenyi Biotec). Data in FIGS. 27A-B clearly illustrate that CD25 scFv targeted Fc-fusions only bind to CD25 expressing HEK-Blue-IL-2 cells, but not to the related HEK-Blue-IL-1 cells.

[0744] The effect on IL-2 signaling was measured in the HEK-Blue IL-2 cells. Cells were pre-incubated with and without an excess (10 μg/ml) of unarmed CD25 scFv Fc-fusion before adding a serial dilution of wild type IL-2 (FIG. 28). After overnight stimulation, secreted phosphatase activity was measured using the Phospha-Light™ SEAP Reporter Gene Assay System (ThermoFisher) and plotted in function of the concentration (FIG. 28). This experiment illustrated that none of the tested proteins interfere with IL-2 signaling.

[0745] Then, the ability of CD25 targeting (here, using the 7G7B6 scFv_VH-VL targeting domain) to restore the loss in biological activity of CD25 (here, F38A_F42K) and IL2Rbeta mutations (here, N88A and N88G) or combinations thereof (R38A_F42K_N88A and R38A_F42K_N88G) was investigated. hFc4-hIL-2 constructs with these mutations were combined with CD8 VHH-hFc3 or with hFc3 constructs for production and purification in ExpiCHO cells. Resulting ALN2 variants were compared for STAT5 phosphorylation in CD25⁻ Tconv, CD25⁺ Tconv and Treg cells as described earlier. Data in FIGS. 29A-N illustrate that:
[0746] i. CD25 targeting has no clear effect on wild type Fc-IL-2 signaling (FIG. 29B vs FIG. 29C)
[0747] ii. CD25 or IL2Rbeta mutations clearly impact signaling in all tested sub-populations (FIG. 29C vs FIG. 29F, FIG. 29H, FIG. 29J, FIG. 29L and FIG. 29N). Combined CD25 and beta mutations (R38A_F42K_N88G) completely abolishes STAT5 phosphorylation up to concentrations of 100 nM (FIG. 29N)
[0748] iii. CD25 targeting clearly restores activity of both CD25 and IL2Rbeta ALN2 variants in CD25 expressing cells (FIG. 29E vs FIG. 29F and FIG. 29G vs FIG. 29H). This results in variants which only signal in CD25⁺ but no longer in CD25⁻ population
[0749] iv. Restoration of the combined mutations (R38A_F42K_N88A and R38A_F42K_N88G) is only partial when compared to the wild type Fc-IL-2 fusion (FIG. 29B vs FIG. 29K and FIG. 29B vs FIG. 29M)

[0750] In conclusion, CD25 targeting (as illustrated here by scFv formats of non-neutralizing anti-CD25 antibodies) allows specific restoration of loss-of-function caused by CD25 and/or β mutations in CD25 expressing cells vs. CD25 negative cells.

### Example 6: Targeting of IL-2 Mimic (Neoleukin) and Mutants Thereof

[0751] Based on the crystal structure of IL-2, an IL-2/IL-15 mimic that lacks the CD25 binding-site but still can efficiently signal through IL-2Rβ and γ_{c} receptors was designed de novo (see, Silva et al., “De novo design of potent and selective mimics of IL-2 and IL-15,” Nature, vol. 565, pp. 186-191, 2019). This 101 amino acid IL-2_mimic elicits downstream cell signaling (e.g. STAT5 phosphorylation) independently of IL-2Rα and IL-15Rα, and has superior therapeutic activity to IL-2 in mouse models of melanoma and colon cancer.

[0752] In this example, this IL-2_mimic sequence was fused via a flexible linker 20*GGS-linker C-terminally of an hIgG1 Fc with effector and knob mutations (hFc4-IL-2_mimic; see sequence below). In this construct, residue D15 (equivalent to D20 in human IL-2) was mutated to T or H, and residue N40 (equivalent to N88 in human IL-2) was mutated to I, G, and R in order to try to attenuate binding to the IL-2Rβ-chain. Resulting constructs (wild type or mutant) were combined with CD8 VHH-hFc3 for production in ExpiCHO cells. Resulting IL-2_mimic (neoleukin) variants were tested for STAT5 phosphorylation in CD8⁺, CD25 Tconv, CD25⁺ Tconv and Treg cells as described in Example 1.

[0753] Data in FIGS. 30A-H illustrate that:
[0754] i. Different cell populations depicted the following sensitivity to wild type IL-2: CD8+<CD25− Tconv<CD25+ Tconv<<<Treg (FIG. 30A).
[0755] ii. An untargted IL-2_mimic Fc-variant is more or less equally active on all tested PBMC subpopulations (e.g., EC50 values of 6.1 pM; 9.6 pM; 2.3 pM; and 8.0 pM for respectively CD8+; CD25− Tconv; Treg; and CD25⁺ Tconv cells) (FIG. 30B).
[0756] iii. CD8 targeting of wild type IL-2_mimic increases signaling in CD8 positive cells, but not in other cell types (FIG. 30C) resulting in a selectivity index of about 10-fold.
[0757] iv. Mutations D15T, D15H, N401, and N40R almost completely abolished IL-2_mimic signaling in CD8 negative cells. Only at very high concentrations (100 nM) could a pSTAT5 signature be observed in these cells (FIGS. 30D, 30E, 30F and 30H).
[0758] V. CD8 targeting is able to restore, at least in part, loss of signaling resulting in EC50 values of 38 pM (D15T); 169 pM (D15H); 53 pM (N401); and 12 pM (N40R) (FIGS. 30D, 30E, 30F and 30H) and a selectivity index which is improved by 10-100 fold compared to targeted wild type IL-2 mimic in FIG. 30C.
[0759] vi. The loss-of-function is less severe for the N40G mutation, both on CD8 positive and CD8 negative cells (FIG. 30G) but the selectivity index is improved by 10-100 fold compared to targeted wild type IL-2 mimic in FIG. 30C.

[0760] In conclusion, CD8 targeting and mutation of residues D15 and N40 of IL-2_mimic clearly increases selectivity towards signaling in CD8 positive over CD8 negative cells. Targeting of wild type IL-2_mimic results only in a modest increase in selectivity.

[0761] Amino Acid Sequences of above Examples 1-6:
[0762] hFc3 (SEQ ID NO: 290)
[0763] hFc4-hIL-2_C125A (SEQ ID NO: 291)
[0764] hFc4-hIL-2_R38A_F42Y_Y45A_E62A_C125A (SEQ ID NO: 292)
[0765] hFc4-hIL-2_F42Y_Y45A_L72G_C125A (SEQ ID NO: 293)
[0766] hFc4-hIL-2_F42K_C125A (SEQ ID NO: 294)
[0767] hFc4-hIL-2_R38A_F42K_C125A (SEQ ID NO: 295)
[0768] hFc4-hIL-2_E61Q_C125A (SEQ ID NO: 296)
[0769] hCD8 VHH-hFc3 (SEQ ID NO: 297)
[0770] hFc4-hIL-2_D20A_C125A (SEQ ID NO: 298)
[0771] hFc4-hIL-2_D20E_C125A (SEQ ID NO: 299)
[0772] hFc4-hIL-2_D20F_C125A (SEQ ID NO: 300)
[0773] hFc4-hIL-2_D20G_C125A (SEQ ID NO: 301)
[0774] hFc4-hIL-2_D20H_C125A (SEQ ID NO: 302)
[0775] hFc4-hIL-2_D20I_C125A (SEQ ID NO: 303)
[0776] hFc4-hIL-2_D20K_C125A (SEQ ID NO: 304)
[0777] hFc4-hIL-2_D20L_C125A (SEQ ID NO: 305)
[0778] hFc4-hIL-2_D20N_C125A (SEQ ID NO: 306)
[0779] hFc4-hIL-2_D20P_C125A (SEQ ID NO: 307)
[0780] hFc4-hIL-2_D20Q_C125A (SEQ ID NO: 308)
[0781] hFc4-hIL-2_D20R_C125A (SEQ ID NO: 309)
[0782] hFc4-hIL-2_D20S_C125A (SEQ ID NO: 310)
[0783] hFc4-hIL-2_D20T_C125A (SEQ ID NO: 311)
[0784] hFc4-hIL-2_D20V_C125A (SEQ ID NO: 312)
[0785] hFc4-hIL-2_D20W_C125A (SEQ ID NO: 313)
[0786] hFc4-hIL-2_D20Y_C125A (SEQ ID NO: 314)
[0787] hFc4-hIL-2_N88A_C125A (SEQ ID NO: 315)
[0788] hFc4-hIL-2_N88D_C125A (SEQ ID NO: 316)
[0789] hFc4-hIL-2_N88E_C125A (SEQ ID NO: 317)
[0790] hFc4-hIL-2_N88F_C125A (SEQ ID NO: 318)
[0791] hFc4-hIL-2_N88G_C125A (SEQ ID NO: 319)
[0792] hFc4-hIL-2_N88H_C125A (SEQ ID NO: 320)
[0793] hFc4-hIL-2_N88I_C125A (SEQ ID NO: 321)
[0794] hFc4-hIL-2_N88K_C125A (SEQ ID NO: 322)
[0795] hFc4-hIL-2_N88L_C125A (SEQ ID NO: 323)
[0796] hFc4-hIL-2_N88P_C125A (SEQ ID NO: 324)
[0797] hFc4-hIL-2_N88Q_C125A (SEQ ID NO: 325)
[0798] hFc4-hIL-2_N88R_C125A (SEQ ID NO: 326)
[0799] hFc4-hIL-2_N88S_C125A (SEQ ID NO: 327)
[0800] hFc4-hIL-2_N88T_C125A (SEQ ID NO: 328)
[0801] hFc4-hIL-2_N88V_C125A (SEQ ID NO: 329)
[0802] hFc4-hIL-2_N88W_C125A (SEQ ID NO: 330)
[0803] hFc4-hIL-2_N88Y_C125A (SEQ ID NO: 331)
[0804] hFc4-hIL-2_D20E_R38A_F42K_C125A (SEQ ID NO: 332)
[0805] hFc4-hIL-2_D20V_R38A_F42K_C125A (SEQ ID NO: 333)
[0806] hFc4-hIL-2_ R38A_F42K_N88A_C125A (SEQ ID NO: 334)
[0807] hFc4-hIL-2_R38A_F42K_N88G_C125A (SEQ ID NO: 335)
[0808] MA251 scFv_VH-VL-hFc3 (SEQ ID NO: 336)
[0809] MA251 scFv_VL-VH-hFc3 (SEQ ID NO: 337)
[0810] 7G7B6 scFv_VH-VL-hFc3 (SEQ ID NO: 338)
[0811] 7G7B6 scFv_VL-VH-hFc3 (SEQ ID NO: 339)
[0812] hFc4-IL-2_mimic (SEQ ID NO: 340)
[0813] hFc4-IL-2_mimic_D15T (SEQ ID NO: 341)
[0814] hFc4-IL-2_mimic_D15H (SEQ ID NO: 342)
[0815] hFc4-IL-2_mimic_N40I (SEQ ID NO: 343)
[0816] hFc4-IL-2_mimic_N40G (SEQ ID NO: 344)
[0817] hFc4-IL-2_mimic_N40R (SEQ ID NO: 345)

### Example 7: Deletion of T3 O-Glycosylation in IL-2

[0818] IL-2 contains a threonine O-glycosylation site on position 3 (T3). In this example, the possibility to remove this site in the context of production, manufacturability and biological activity is evaluated. Two strategies are used: (i) site-specific mutations in which T3 is mutated to a A, F, H, L, V, or Y, or (ii) deletion-mutagenesis in which the first 3, 4, 5, 6, 7, or 8 residues of the IL-2 sequence are deleted. Mutations are made using standard mutagenesis techniques in the CD8-targeted ALN2 format. The IL-2 sequence is cloned (via a flexible 20*GGS linker)C-terminal of the hIgG1 Fc sequence with L234A_L235A_K322Q effector and S354C_T366W ‘knob’ mutations (referred to as hFc4). The IL-2 warhead contains following mutations: (i) R38A_F42K which block binding to CD25 or IL-2Ralpha, (ii) N88G that attenuates in a restorable fashion then interaction with IL-2Rbeta, and (iii) C125A which removes a free cysteine residue resulting in a superior manufacturability. The resulting construct is combined with a fusion of CD8 VHH 1CDA65 and hlG1 Fc with L234A_L235A_K322Q effector and Y349C_T366S_L368A_Y407V ‘hole’ mutations (referred to as hFc3). To produce this ‘knob-in-hole’ Fc-ALN2, a combination of both ‘hole’ and ‘knob’ plasmids is transfected in ExpiCHO cells (ThermoFisher) according to the manufacturer's instructions. One week after transfection, supernatant is collected, and cells removed by centrifugation. Recombinant proteins are purified based on protein A binding properties (Hitrap MabSelect SuRe column, GE Healthcare) and by subsequent size exclusion chromatography (Superdex 200 increase HiScale 16/40 column, GE Healthcare), both on an Äkta purifier (GE Healthcare). Concentrations are measured with a spectrophotometer (NanoDrop instrument, Thermo Scientific) and purity estimated on SDS-PAGE.

[0819] Resulting ALN2 O-glycosylation variants are tested for STAT5 phosphorylation in (i) CD8 positive T cells (CD8⁺); (ii) CD25 negative conventional T cells (CD25⁻ Tconv); (iii) CD25 positive conventional T cells (CD25⁺ Tconv); or (iv) regulatory T cells (Treg) defined as CD4⁺CD25+FoxP3+. In brief, PBMCs from buffy coats of healthy donors are isolated using density gradient centrifugation using Lymphoprep (StemCell technologies). Cells are stimulated with a serial dilution wild type recombinant IL-2 or Fc-ALN2 for 30 minutes at 37° C. After centrifugation, cells are resuspended in Lyse/Fix buffer (BD Biosciences) and further incubated for 10 minutes at 37° C. Cells are washed and incubated with human FcR Blocking Reagent (Miltenyi Biotec) and stained with anti-CD25 and anti-CD8 for 30 minutes at room temperature. Cells are subsequently permeabilized using the Perm Buffer III (BD Biosciences) at 4° C. for 30 minutes. Cells are finally stained with anti-CD3, anti-CD4, anti-FoxP3, and anti-pSTAT5 for 1 hour. Samples are acquired on a MACSQuant X instrument (Miltenyi Biotec) and analyzed using the FlowLogic software (Miltenyi Biotec).

[0820] To evaluate the stability of the O-glycosylation ALN2 variants, purified proteins are concentrated up to 10 mg/ml and subjected to five freeze (−20° C.)-thaw-cycles. After each cycle the sample are centrifuged, and protein concentrations measured on a Nanodrop spectrophotometer. Before and after the freeze-thaw cycles, the samples are analyzed by size exclusion chromatography (Superdex 200 increase HiScale 16/40 column, GE Healthcare) on an Äkta purifier.

[0821] The following amino acid sequences are used in this Example:
[0822] hCD8 VHH-hFc3 (SEQ ID NO: 346)
[0823] hFc4-hIL-2_R38A_F42K_N88G_C125A (SEQ ID NO: 347)
[0824] hFc4-hIL-2_T3A_R38A_F42K_N88G_C125A (SEQ ID NO: 348)
[0825] hFc4-hIL-2_T3F_R38A_F42K_N88G_C125A (SEQ ID NO: 349)
[0826] hFc4-hIL-2_T3H_R38A_F42K_N88G_C125A (SEQ ID NO: 350)
[0827] hFc4-hIL-2_T3L_R38A_F42K_N88G_C125A (SEQ ID NO: 351)
[0828] hFc4-hIL-2_T3V_R38A_F42K_N88G_C125A (SEQ ID NO: 352)
[0829] hFc4-hIL-2_T3Y_R38A_F42K_N88G_C125A (SEQ ID NO: 353)
[0830] hFc4-hIL-2_R38A_F42K_N88G_C125A_del3 (SEQ ID NO: 354)
[0831] hFc4-hIL-2_R38A_F42K_N88G_C125A_del4 (SEQ ID NO: 355)
[0832] hFc4-hIL-2_R38A_F42K_N88G_C125A_del5 (SEQ ID NO: 356)
[0833] hFc4-hIL-2_R38A_F42K_N88G_C125A_del6 (SEQ ID NO: 357)
[0834] hFc4-hIL-2_R38A_F42K_N88G_C125A_del7 (SEQ ID NO: 358)
[0835] hFc4-hIL-2_R38A_F42K_N88G_C125A_del8 (SEQ ID NO: 359)

### Example 8: Bi-Valent and Bi-Paratopic Targeting of IL-2 Activity

[0836] In this example, the efficiency of targeting of IL-2 activity to CD8 positive cells is compared using formats with one or two VHHs. These VHHs can be the same (resulting in a bi-valent configuration) or different (resulting in so-called bi-paratopic formats). On a knob-in-hole scaffold, VHHs and IL-2 warhead can be cloned in different configurations, as outlined in FIG. 31.

[0837] Specifically, seven different CD8 VHHs are cloned: 1CDA65, 2CDA5, 3CDA19, 2CDA47, 2CDA68, R2HCD26 and R3HCD129 in vectors encoding ALN2 variants with configuration 1 depicted in FIG. 31. As described in Example 7, the IL-2 warhead contains the R38A_F42K, N88G, and C125A mutations for respectively CD25 knock-out, restorable beta attenuation, and manufacturability. Resulting ALN2 formats are produced by transient transfection of ExpiCHO cells with following combinations of plasmids:
[0838] hCD8 VHH 1CDA65-hFc3+hFc4-IL-2_R38A_F42K_N88G_C125A
[0839] hCD8 VHH 1CDA65-hFc3+hCD8 VHH 1CDA65-hFc4-IL-2_R38A_F42K_N88G_C125A
[0840] hCD8 VHH 1CDA65-hFc3+hCD8 VHH 2CDA5-hFc4-IL-2_R38A_F42K_N88G_C125A
[0841] hCD8 VHH 1CDA65-hFc3+hCD8 VHH 3CDA19-hFc4-IL-2_R38A_F42K_N88G_C125A
[0842] hCD8 VHH 1CDA65-hFc3+hCD8 VHH 2CDA47-hFc4-IL-2_R38A_F42K_N88G_C125A
[0843] hCD8 VHH 1CDA65-hFc3+hCD8 VHH 2CDA68-hFc4-IL-2_R38A_F42K_N88G_C125A
[0844] hCD8 VHH 1CDA65-hFc3+hCD8 VHH R2HCD26-hFc4-IL-2_R38A_F42K_N88G_C125A
[0845] hCD8 VHH 1CDA65-hFc3+hCD8 VHH R3HCD129-hFc4-IL-2_R38A_F42K_N88G_C125A
[0846] hFc3+hCD8 VHH 1CDA65-hFc4-IL-2_R38A_F42K_N88G_C125A
[0847] hFc3+hCD8 VHH 2CDA5-hFc4-IL-2_R38A_F42K_N88G_C125A
[0848] hFc3+hCD8 VHH 3CDA19-hFc4-IL-2_R38A_F42K_N88G_C125A
[0849] hFc3+hCD8 VHH 2CDA47-hFc4-IL-2_R38A_F42K_N88G_C125A
[0850] hFc3+hCD8 VHH 2CDA68-hFc4-IL-2_R38A_F42K_N88G_C125A
[0851] hFc3+hCD8 VHH R2HCD26-hFc4-IL-2_R38A_F42K_N88G_C125A
[0852] hFc3+hCD8 VHH R3HCD129-hFc4-IL-2_R38A_F42K_N88G_C125A
[0853] hFc3+hFc4-IL-2_R38A_F42K_N88G_C125A

[0854] Resulting proteins are purified from the supernatans and tested for STAT5 phosphorylation in CD8⁺; CD25⁻ Tconv; CD25⁺ Tconv; and CD4⁺CD25⁺FoxP3⁺ Treg cells as described earlier.

[0855] While the monospecific constructs have the configuration 4 of FIG. 32, the VHH 1CDA65 is a construct having the configuration 1 of FIG. 32 and was generated as a monospecific construct. It is referred to as 1CDA-65-Fc-ALN2 bis in FIGS. 33A-G. Data in FIGS. 33A-G illustrate that on CD8 cells:
[0856] i. The constructs 1CDA65-Fc-ALN2 and 1CDA65-Fc-ALN2 bis have similar potency;
[0857] ii. A bi-valent 1CDA65-1CDA65-Fc-ALN2 has similar activity as its mono-valent counterparts 1CDA65-Fc-ALN2 or 1CDA65-Fc-ALN2-bis; and
[0858] iii. A gain in biological activity is observed with the bi-paratopic configurations 1CDA65-2CDA5-Fc-ALN2, 1CDA65-2CDA68-Fc-ALN2 and 1CDA65-R2HCD26-Fc-ALN2. Of note, VHHs 1CDA65 and 2CDA4774 belong to the same epitope bin, while VHHs 2CDA5, 3CDA19, 2CDA68 and R2HCD26 belong to a second bin. Due to its lower affinity, no epitope bin was determined for VHH R3HCD129. Remarkably, ALN2 variants with two targeting domains from a different epitope bin are on average 10-fold more active than their mono-specific counterparts.

[0859] The following amino acid sequences were used in this Example:
[0860] hCD8 VHH 1CDA65-hFc3 (SEQ ID NO: 360)
[0861] hFc4-hIL-2_R38A_F42K_N88G_C125A (SEQ ID NO: 361)
[0862] hCD8 VHH 1CDA65-hFc4-IL-2_R38A_F42K_N88G_C125A (SEQ ID NO: 362)
[0863] hCD8 VHH 2CDA5-hFc4-IL-2_R38A_F42K_N88G_C125A (SEQ ID NO: 363)
[0864] hCD8 VHH 3CDA19-hFc4-IL-2_R38A_F42K_N88G_C125A (SEQ ID NO: 364)
[0865] hCD8 VHH 2CDA47-hFc4-IL-2_R38A_F42K_N88G_C125A (SEQ ID NO: 365)
[0866] hCD8 VHH 2CDA68-hFc4-IL-2_R38A_F42K_N88G_C125A (SEQ ID NO: 366)
[0867] hCD8 VHH R2HCD26-hFc4-IL-2_R38A_F42K_N88G_C125A (SEQ ID NO: 367)
[0868] hCD8 VHH R3HCD129-hFc4-IL-2_R38A_F42K_N88G_C125A (SEQ ID NO: 368)
[0869] hFc3 (SEQ ID NO: 369)

### Example 9: Evaluation of Alternative ALN2 Configurations

[0870] In this example, different CD8 targeted ALN2 configurations are compared. Specifically, VHH and/or IL-2 warhead are cloned N- or C-terminal of the knob-in-hole Fc scaffold, on the same or opposite sites of the molecule. Formats can harbor one or two warheads, cloned in tandem or on different Fc-chains. VHH and warheads can also be cloned in series, or VHH in between two IL-2 moieties. All possible configurations are schematically outlined in FIG. 32.

[0871] The following ALN2 plasmid combinations are transfected in ExpiCHO cells, purified from the supernatans, tested for pSTAT5 in CD8+; CD25⁻ Tconv; CD25⁺ Tconv; and CD4⁺CD25+FoxP3⁺ Treg cells and screened for stability as described earlier:
[0872] hCD8 VHH 1CDA65-hFc3+hFc4-IL-2_R38A_F42K_N88G_C125A (configuration 1 in FIG. 32)
[0873] hCD8 VHH 1CDA65-hFc3+IL-2_R38A_F42K_N88G_C125A-hFc4-IL-2_R38A_F42K_N88G_C125A (configuration 9 in FIG. 32)
[0874] hCD8 VHH 1CDA65-hFc3-hFc4-IL-2_R38A_F42K_N88G_C125A+hFc4-IL-2_R38A_F42K_N88G_C125A (configuration 13 in FIG. 32)
[0875] hCD8 VHH 1CDA65-hFc3+hFc4-IL-2_R38A_F42K_N88G_C125A-IL-2_R38A_F42K_N88G_C125A (configuration 25 in FIG. 32)
[0876] hCD8 VHH 1CDA65-hFc3+IL-2_R38A_F42K_N88G_C125A-IL-2_R38A_F42K_N88G_C125A-hFc4 (configuration 26 in FIG. 32)

[0877] Further, data in FIGS. 34A-E illustrate that all tested variants gave clear pSTAT5 in CD8+ but not in Treg cells, thereby illustrating their selectivity.

[0878] The following amino acid sequences are used in this Example:
[0879] hCD8 VHH 1CDA65-hFc3 (SEQ ID NO: 370)
[0880] hFc4-hIL-2_R38A_F42K_N88G_C125A (SEQ ID NO: 371)
[0881] IL-2_R38A_F42K_N88G_C125A-hFc4-IL-2_R38A_F42K_N88G_C125A (SEQ ID NO: 372)
[0882] hCD8 VHH 1CDA65-hFc3-hFc4-IL-2_R38A_F42K_N88G_C125A (SEQ ID NO: 373)
[0883] hFc4-IL-2_R38A_F42K_N88G_C125A-IL-2_R38A_F42K_N88G_C125A (SEQ ID NO: 374)
[0884] IL-2_R38A_F42K_N88G_C125A-IL-2_R38A_F42K_N88G_C125A-hFc4 (SEQ ID NO: 375)

### Example 10: Combination of Beta and Gamma Mutations

[0885] The purpose of this example is to evaluate the effect of combining a loss-of-function mutation in the IL-2Rbeta binding-site (N88A, N88G, D20E or D20V) with a mutation that hampers interaction with the γ. chain in the IL-2R. For this latter mutation, residue Q126 has been identified as being crucial and is mutated.

[0886] The mutations are summarized in Table 8:

| Binding-site | Mutations |
|---|---|
| Beta | D20E, D20V, N88A, and N88G |
| Gamma | Q126A, Q126D, Q126E, Q126F, Q126G, Q126H, Q1261, Q126K, Q126L, Q126M, |
| | Q126N, Q126P, Q126R, Q126S, Q126T, Q126V, Q126W, and Q126Y |
| Beta-gamma | D20E_Q126A, D20E_Q126D, D20E_Q126E, D20E_Q126F, D20E_Q126G, |
| | D20E_Q126H, D20E_Q1261, D20E_Q126K, D20E_Q126L, D20E_Q126M, |
| | D20E_Q126N, D20E_Q126P, D20E_Q126R, D20E_Q126S, D20E_Q126T, |
| | D20E_Q126V, D20E_Q126W, D20E_Q126Y, D20V_Q126A, D20V_Q126D, |
| | D20V_Q126E, D20V_Q126F, D20V_Q126G, D20V_Q126H, D20V_Q1261, |
| | D20V_Q126K, D20V_Q126L, D20V_Q126M, D20V_Q126N, D20V_Q126P, |
| | D20V_Q126R, D20V_Q126S, D20V_Q126T, D20V_Q126V, D20V_Q126W, |
| | D20V_Q126Y, N88A_Q126A, N88A_Q126D, N88A_Q126E, N88A_Q126F, |
| | N88A_Q126G, N88A_Q126H, N88A_Q1261, N88A_Q126K, N88A_Q126L, |
| | N88A_Q126M, N88A_Q126N, N88A_Q126P, N88A_Q126R, N88A_Q126S, |
| | N88A_Q126T, N88A_Q126V, N88A_Q126W, N88A_Q126Y, N88G_Q126A, |
| | N88G_Q126D, N88G_Q126E, N88G_Q126F, N88G_Q126G, N88G_Q126H, |
| | N88G_Q1261, N88G_Q126K, N88G_Q126L, N88G_Q126M, N88G_Q126N, |
| | N88G_Q126P, N88G_Q126R, N88G_Q126S, N88G_Q126T, N88G_Q126V, |
| | N88G_Q126W, and N88G_Q126Y |

[0887] Mutations or combinations thereof are made using standard mutagenesis techniques in the CD8-targeted ALN2 format (as described in examples above). Here, the IL-2 warhead contains only the C125A mutation for manufacturability reasons. Resulting plasmids are combined with CD8 VHH-hFc3 plasmid for transient transfection in ExpiCHO cells. Proteins are purified using protein A spin plates (ThermoFisher), quantified and purity tested using SDS-PAGE.

[0888] Resulting ALN2 variants are tested for STAT5 phosphorylation in CD8⁺, CD4⁺CD25, and CD4⁺CD25⁺ PBMC populations as follows: PBMCs are blocked human FcR Blocking Reagent (Miltenyi Biotec) and stained fluorescently labelled Ab's specific for CD4, CD8, and CD25. After staining and washing, cells are stimulated with a serial dilution IL-2 or ALN2 variants for 30 min at 37° C. Cells are subsequently fixed with Lyse/Fix buffer (BD Biosciences) and permeabilized using the Perm Buffer III (BD Biosciences) according to the manufacturer's guidelines. After overnight staining with a pSTAT5 specific Ab, samples are analyzed on a MACSQuant X instrument (Miltenyi Biotec) and analyzed using the FlowLogic software (Miltenyi Biotec).

[0889] The following amino acid sequences are used in this Example:
[0890] hCD8 VHH-hFc3 (SEQ ID NO: 376)
[0891] hFc4-hIL-2_C125A (SEQ ID NO: 377)
[0892] hFc4-hIL-2_C125A_D20E_Q126A (SEQ ID NO: 378)
[0893] hFc4-hIL-2_C125A_D20E_Q126D (SEQ ID NO: 379)
[0894] hFc4-hIL-2_C125A_D20E_Q126E (SEQ ID NO: 380)
[0895] hFc4-hIL-2_C125A_D20E_Q126F (SEQ ID NO: 381)
[0896] hFc4-hIL-2_C125A_D20E_Q126G (SEQ ID NO: 382)
[0897] hFc4-hIL-2_C125A_D20E_Q126H (SEQ ID NO: 383)
[0898] hFc4-hIL-2_C125A_D20E_Q126I (SEQ ID NO: 384)
[0899] hFc4-hIL-2_C125A_D20E_Q126K (SEQ ID NO: 385)
[0900] hFc4-hIL-2_C125A_D20E_Q126L (SEQ ID NO: 386)
[0901] hFc4-hIL-2_C125A_D20E_Q126M (SEQ ID NO: 387)
[0902] hFc4-hIL-2_C125A_D20E_Q126N (SEQ ID NO: 388)
[0903] hFc4-hIL-2_C125A_D20E_Q126P (SEQ ID NO: 389)
[0904] hFc4-hIL-2_C125A_D20E_Q126R (SEQ ID NO: 390)
[0905] hFc4-hIL-2_C125A_D20E_Q126S (SEQ ID NO: 391)
[0906] hFc4-hIL-2_C125A_D20E_Q126T (SEQ ID NO: 392)
[0907] hFc4-hIL-2_C125A_D20E_Q126V (SEQ ID NO: 393)
[0908] hFc4-hIL-2_C125A_D20E_Q126W (SEQ ID NO: 394)
[0909] hFc4-hIL-2_C125A_D20E_Q126Y (SEQ ID NO: 395)
[0910] hFc4-hIL-2_C125A_D20V_Q126A (SEQ ID NO: 396)
[0911] hFc4-hIL-2_C125A_D20V_Q126D (SEQ ID NO: 397)
[0912] hFc4-hIL-2_C125A_D20V_Q126E (SEQ ID NO: 398)
[0913] hFc4-hIL-2_C125A_D20V_Q126F (SEQ ID NO: 399)
[0914] hFc4-hIL-2_C125A_D20V_Q126G (SEQ ID NO: 400)
[0915] hFc4-hIL-2_C125A_D20V_Q126H (SEQ ID NO: 401)
[0916] hFc4-hIL-2_C125A_D20V_Q126I (SEQ ID NO: 402)
[0917] hFc4-hIL-2_C125A_D20V_Q126K (SEQ ID NO: 403)
[0918] hFc4-hIL-2_C125A_D20V_Q126L (SEQ ID NO: 404)
[0919] hFc4-hIL-2_C125A_D20V_Q126M (SEQ ID NO: 405)
[0920] hFc4-hIL-2_C125A_D20V_Q126N (SEQ ID NO: 406)
[0921] hFc4-hIL-2_C125A_D20V_Q126P (SEQ ID NO: 407)
[0922] hFc4-hIL-2_C125A_D20V_Q126R (SEQ ID NO: 408)
[0923] hFc4-hIL-2_C125A_D20V_Q126S (SEQ ID NO: 409)
[0924] hFc4-hIL-2_C125A_D20V_Q126T (SEQ ID NO: 410)
[0925] hFc4-hIL-2_C125A_D20V_Q126V (SEQ ID NO: 411)
[0926] hFc4-hIL-2_C125A_D20V_Q126W (SEQ ID NO: 412)
[0927] hFc4-hIL-2_C125A_D20V_Q126Y (SEQ ID NO: 413)
[0928] hFc4-hIL-2_C125A_N88A_Q126A (SEQ ID NO: 414)
[0929] hFc4-hIL-2_C125A_N88A_Q126D (SEQ ID NO: 415)
[0930] hFc4-hIL-2_C125A_N88A_Q126E (SEQ ID NO: 416)
[0931] hFc4-hIL-2_C125A_N88A_Q126F (SEQ ID NO: 417)
[0932] hFc4-hIL-2_C125A_N88A_Q126G (SEQ ID NO: 418)
[0933] hFc4-hIL-2_C125A_N88A_Q126H (SEQ ID NO: 419)
[0934] hFc4-hIL-2_C125A_N88A_Q126I (SEQ ID NO: 420)
[0935] hFc4-hIL-2_C125A_N88A_Q126K (SEQ ID NO: 421)
[0936] hFc4-hIL-2_C125A_N88A_Q126L (SEQ ID NO: 422)
[0937] hFc4-hIL-2_C125A_N88A_Q126M (SEQ ID NO: 423)
[0938] hFc4-hIL-2_C125A_N88A_Q126N (SEQ ID NO: 424)
[0939] hFc4-hIL-2_C125A_N88A_Q126P (SEQ ID NO: 425)
[0940] hFc4-hIL-2_C125A_N88A_Q126R (SEQ ID NO: 426)
[0941] hFc4-hIL-2_C125A_N88A_Q126S (SEQ ID NO: 427)
[0942] hFc4-hIL-2_C125A_N88A_Q126T (SEQ ID NO: 428)
[0943] hFc4-hIL-2_C125A_N88A_Q126V (SEQ ID NO: 429)
[0944] hFc4-hIL-2_C125A_N88A_Q126W (SEQ ID NO: 430)
[0945] hFc4-hIL-2_C125A_N88A_Q126Y (SEQ ID NO: 431)
[0946] hFc4-hIL-2_C125A_N88G_Q126A (SEQ ID NO: 432)
[0947] hFc4-hIL-2_C125A_N88G_Q126D (SEQ ID NO: 433)
[0948] hFc4-hIL-2_C125A_N88G_Q126E (SEQ ID NO: 434)
[0949] hFc4-hIL-2_C125A_N88G_Q126F (SEQ ID NO: 435)
[0950] hFc4-hIL-2_C125A_N88G_Q126G (SEQ ID NO: 436)
[0951] hFc4-hIL-2_C125A_N88G_Q126H (SEQ ID NO: 437)
[0952] hFc4-hIL-2_C125A_N88G_Q126I (SEQ ID NO: 438)
[0953] hFc4-hIL-2_C125A_N88G_Q126K (SEQ ID NO: 439)
[0954] hFc4-hIL-2_C125A_N88G_Q126L (SEQ ID NO: 440)
[0955] hFc4-hIL-2_C125A_N88G_Q126M (SEQ ID NO: 441)
[0956] hFc4-hIL-2_C125A_N88G_Q126N (SEQ ID NO: 442)
[0957] hFc4-hIL-2_C125A_N88G_Q126P (SEQ ID NO: 443)
[0958] hFc4-hIL-2_C125A_N88G_Q126R (SEQ ID NO: 444)
[0959] hFc4-hIL-2_C125A_N88G_Q126S (SEQ ID NO: 445)
[0960] hFc4-hIL-2_C125A_N88G_Q126T (SEQ ID NO: 446)
[0961] hFc4-hIL-2_C125A_N88G_Q126V (SEQ ID NO: 447)
[0962] hFc4-hIL-2_C125A_N88G_Q126W (SEQ ID NO: 448)
[0963] hFc4-hIL-2_C125A_N88G_Q126Y (SEQ ID NO: 449)

### Example 11: Single-Peptide ALN2 Variants

[0964] This Example shows the effects of single-peptide ALN2 variants. The no-alpha IL-2 variant (mutations R38A_F42K) was cloned into a single-peptide A-Kine format. To this end, sequences encoding the CD8 VHH 1CDA65 and IL-2 were fused via a flexible 20*GGS-linker in the pcDNA3.4 expression vector for eukaryotic expression. A C-terminal 6*His tag was added for purification purposes. D20E, D20V, N88A, and N88G mutants were made using standard mutagenesis techniques and resulting plasmids were transfected in ExpiCHO cells (ThermoFisher) according to the manufacturer's guidelines. One week after transfection, supernatant was collected, and cells removed by centrifugation. Recombinant proteins were purified based on the His-tag (His Trap Excel column; Cytiva) and by subsequent size exclusion chromatography (Superdex 200 increase HiScale 16/40 column, Cytiva), both on an Äkta purifier (GE Healthcare). Concentrations were measured with a spectrophotometer (NanoDrop instrument, Thermo Scientific) and purity was estimated on SDS-PAGE.

[0965] The resulting proteins were tested for STAT5 phosphorylation in CD8⁺ versus Treg cells, as described earlier. As shown in FIGS. 35A-D, all except for the mutation R38A_F42K_D20V allow, in the concentration range tested, selective signaling for CD8+ over Treg cells. The N88 variants R38A_F42K_N88A (EC₅₀: 0.17 ng/ml) or R38A_F42K_N88G (EC₅₀: 0.08 ng/ml) variants appear more potent than the R38A_F42K_D20E mutant (EC₅₀: 5.8 ng/ml) on CD8⁺ cells.

[0966] The following amino acid sequences were used in this Example:
[0967] hCD8 VHH-hIL-2_D20E_R38A_F42K_C125A (SEQ ID NO: 478)
[0968] hCD8 VHH-hIL-2_D20V_R38A_F42K_C125A (SEQ ID NO: 479)
[0969] hCD8 VHH-hIL-2_R38A_F42K_N88A_C125A (SEQ ID NO: 480)
[0970] hCD8 VHH-hIL-2_R38A_F42K_N88G_C125A (SEQ ID NO: 481)

### Example 12: Removal of T3 O-Glycosylation Site in IL-2 Warhead

[0971] IL-2 contains a threonine O-glycosylation site on position 3 (T3). In this example, the possibility to remove this site in the context of production, manufacturability and biological activity is evaluated. Two strategies are used: (i) site-specific mutations in which T3 is mutated to a A, F, H, L, V, or Y, or (ii) deletion-mutagenesis in which the first 3, 4, 5, 6, 7, or 8 residues of the IL-2 sequence are deleted. Mutations were made using standard mutagenesis techniques in the CD8-targeted ALN2 format. The IL-2 sequence was cloned (via a flexible 20*GGS linker)C-terminal of the hIgG1 Fc sequence with L234A_L235A_K322Q effector and S354C_T366W ‘knob’ mutations (referred to as hFc4). The IL-2 warhead contains following mutations: (i) R38A_F42K which block binding to CD25 or IL-2Ralpha, (ii) N88G that attenuates in a restorable fashion then interaction with IL-2Rbeta, and (iii) C125A which removes a free cysteine residue resulting in a superior manufacturability. The resulting construct was combined with a fusion of CD8 VHH 1CDA65 and hlG1 Fc with L234A_L235A_K322Q effector and Y349C_T366S_L368A_Y407V ‘hole’ mutations (referred to as hFc3). To produce this ‘knob-in-hole’ Fc-ALN2, a combination of both ‘hole’ and ‘knob’ plasmids was transfected in ExpiCHO cells (ThermoFisher) according to the manufacturer's instructions. One week after transfection, supernatant was collected, and cells removed by centrifugation. Recombinant proteins were purified using protein A spin plates (ThermoFisher), quantified and purity tested using SDS-PAGE. Resulting variants were tested for STAT5 phosphorylation in CD8 positive (CD8⁺), and CD8 negative (CD8−) PBMC populations as follows: PBMCs were blocked human FcR Blocking Reagent (Miltenyi Biotec) and stained fluorescently labelled Ab's specific for CD8. After staining and washing, cells were stimulated with a serial dilution CD8 VHH-Fc-IL-2 variants as indicated for 30 min at 37° C. Cells were subsequently fixed with Lyse/Fix buffer (BD Biosciences) and permeabilized using the Perm Buffer III (BD Biosciences) according to the manufacturer's guidelines. After overnight staining with a pSTAT5 specific Ab, samples were analyzed on a MACSQuant X instrument (Miltenyi Biotec) and analyzed using the FlowLogic software (Miltenyi Biotec).

[0972] Data in FIGS. 36A-M illustrate that substitution of T3 to H, I, L V, Y or A, or deletion of up to 7 amino acids, have a comparable activity on CD8⁺ cells with EC50 values varying from 1 to 5 ng/ml. However, the IL-2_del8 variant was 10-fold less active compared to wild type IL-2. In contrast, the T3F (not shown) mutation no longer showed detectable activity. Effects on signaling in CD8− populations were shown to be very similar.

[0973] The following amino acid sequences were used in this Example:
[0974] hFc4-hIL-2_C125A (SEQ ID NO: 482)
[0975] hCD8 VHH-hFc3 (SEQ ID NO: 483)
[0976] hFc4-hIL-2_T3A_C125A (SEQ ID NO: 484)
[0977] hFc4-hIL-2_T3H_C125A (SEQ ID NO: 485)
[0978] hFc4-hIL-2_T3L_C125A (SEQ ID NO: 486)
[0979] hFc4-hIL-2_T3V_C125A (SEQ ID NO: 487)
[0980] hFc4-hIL-2_T3Y_C125A (SEQ ID NO: 488)
[0981] hFc4-hIL-2_C125A_del3 (SEQ ID NO: 489)
[0982] hFc4-hIL-2_C125A_del4 (SEQ ID NO: 490)
[0983] hFc4-hIL-2_C125A_del5 (SEQ ID NO: 491)
[0984] hFc4-hIL-2_C125A_del6 (SEQ ID NO: 492)
[0985] hFc4-hIL-2_C125A_del7 (SEQ ID NO: 493)
[0986] hFc4-hIL-2_C125A_del8 (SEQ ID NO: 494)

### Example 13: In Vivo Evaluation of the Alpha: Beta Combination

[0987] Since human IL-2 is cross-reactive on the mouse IL-2 receptor, the activity of the human alpha:beta ALN2 variants on mouse cells was tested. To this end, the VHH specific for human CD8 (1CDA65) was replaced by the mouse CD8 specific VHH R2CDE47 in the VHH-Fc fusion with effector and whole mutations. The resulting construct (mCD8 VHH-hFc3) was combined with the knob Fc fused to the ALN2 warheads with the R38A_F42K alpha knock-out mutation and one of the restorable beta mutations D20E, D20V, N88A or N88G. Mouse CD8 targeted ALN2 variants were expressed in ExpiCHO and purified as described above. Initially, these variants were tested for STAT5 phosphorylation in primary mouse splenocytes. In brief, splenocytes (RBC lysed with ACK buffer) from C57BI/6 mice were stained for cell surface markers (Viability, CD3, CD4, CD8 alpha, CD8 beta) and stimulated ex vivo for 30 minutes different mouse CD8 targeted ALN2 variants. Stimulation was stopped by adding 1×TFP Fix/Perm buffer (BD Pharmingen) and incubated for 50 minutes at 4° C., followed by 2 wash steps with 1×TFP Perm/Wash (BD Pharmingen). Cell pellets were resuspended in Perm/Wash III (Transcription Factor Phospho buffer set, BD Pharmingen) and incubated ON at −20° C. followed by intracellular FoxP3 and pSTAT5 staining. Samples were acquired on a MACSQuant16 flow cytometer and analyzed with FlowLogic 8.4 Software (Miltenyi Biotec).

[0988] Activity on CD8⁺ cells for the D20E, N88A or N88G combinations were comparable (EC50 values between 36 and 94 ng/ml), while only signaling at very high concentrations could be observed in Treg cells for these variants (FIGS. 37A-D). The D20V combo mutant appears inactive on both tested splenocyte subpopulations. Based on these data and on preliminary production and stability observations, the mouse CD8 targeted human R38A_F42K_N88G IL-2 mutant was used (in the rest of this example referred to as CD8-Fc-ALN2) for further in vivo evaluation.

[0989] The anti-tumor efficacy of the mouse CD8 targeted ALN2 variant (CD8-Fc-ALN2) with combined mutations R38A_F42K_N88G was evaluated in two syngeneic murine models for colon cancer, MC38 and CT26, and compared to an untargeted ALN2 variant (Fc-ALN2). In brief, C57BI/6J mice (female, 9 weeks old) were injected subcutaneously (s.c.) with 6E+5 MC38 cells or Balb/c mice (female, 9 weeks old) with 6E+5 CT26 cells. Seven days later, tumors volumes reached 20-90 mm³ (MC38) or 40-120 mm³ (CT26), and treatments were started: mice received intravenously (i.v.) either buffer, or equimolar amounts untargeted Fc-ALN2 (21 μg/mouse) or targeted CD8-Fc-ALN2 (25 μg/mouse) on days 7 and 14 after tumor inoculation.

[0990] Tumor sizes (means+/−SEM; n=5 per group) were measured daily and plotted in FIG. 38. The data clearly illustrate that while the untargeted ALN2 had, compared to the buffer treated animals, no significant effect, the CD8-Fc-ALN2 clearly and substantially inhibited tumor growth in both models. At day 21, even one CD8-Fc-ALN2 treated animal was completely tumor-free in the MC38 model.

[0991] In a parallel experiment, the combined action of the CD8-Fc-ALN2 and an anti-PD-1 Ab as check-point inhibitor in both MC38 and CT26 models were investigated. To this end, tumor-bearing C57BI/6J (MC38) or Balb/c mice (CT26) received i.v. buffer or CD8-Fc-ALN2 (12.5 μg/mouse) on days 7, 10, 14 and 17 after tumor inoculation. This buffer or ALN2 treatment was supplemented by intraperitoneal (i.p.) anti-PD-1 Ab treatments (200 μg/mouse) on the same days as the i.v. treatments. Shown in FIG. 39 are tumor sizes as means+/−SEM (n=5 per group). The number at the end of each curve indicates the amount of completely tumor-free mice at the end of the experiment (day 22). In the MC38 model, anti-PD-1 did not have an effect on its own, the CD8-Fc-ALN2 alone had an intermediate effect (with 2 out of 5 mice completely tumor-free), but the combination resulted in a complete tumor regression in all animals. A similar combined/additional effect was observed in the CT26 model: while both monotherapies (CD8-Fc-ALN2 and anti-PD-1) had no significant effect, the combined treatment slowed tumor growth and resulted even in complete eradication in one animal.

[0992] Of note, tumor-free MC38 mice were subsequently re-challenged on the other flank 56 days after the first MC38 tumor inoculation. All tumor-free and re-challenged mice were still completely tumor-free 2 months later, while control animals developed a tumor that necessitated euthanasia (reaching 1500 mm³) 17 to 21 days after tumor inoculation.

[0993] The following amino acid sequences were used in the Example:
[0994] mCD8 VHH-hFc3 (SEQ ID NO: 495)
[0995] hFc4-hIL-2_D20E_R38A_F42K_C125A (SEQ ID NO: 332)
[0996] hFc4-hIL-2_D20V_R38A_F42K_C125A (SEQ ID NO: 333)
[0997] hFc4-hIL-2_ R38A_F42K_N88A_C125A (SEQ ID NO: 334)
[0998] hFc4-hIL-2_R38A_F42K_N88G_C125A (SEQ ID NO: 335)
[0999] hFc3 (SEQ ID NO: 369)

### Example 14: Screening of Gamma Common Mutations

[1000] In a cancer context it may be desirable to selectively activate cytotoxic T lymphocytes (CTLs) with IL-2 while minimizing the effects on the Treg cells that dampen these immune responses. One therapeutic strategy is to use these so-called no-alpha IL-2 variants that no longer bind the IL-2R alpha chain that is mainly causing the IL-2 hyper-sensitivity of Treg cells. As described above, a CD8-targeted no-alpha Fc variant is still able to activate Treg cells with an EC50 of 1 to 2 ng/ml. The combination with a restorable (upon CD8 targeting) IL-2R beta mutation (D20E, D20V, N88A, or N88G) further decreases Treg activation and improves the selectivity towards CD8 expressing cells (see Example 4; FIGS. 26A-J).

[1001] In this example, mutation of the interaction-site with gamma common receptor was evaluated to evaluate to what extent such a mutation has the same beneficial effect as the beta mutations. Likely candidates for A-Kine mutation are substitutions of residue Q126, central in the interaction between IL-2 and the gamma common chain. Therefore, this residue was mutated to any other (except for cysteine) amino acid, in the Fc4-IL-2_C125A chain and combined with CD8 VHH-hFc3 for production in ExpiCHO. One week after transfection, proteins were purified from the supernatans using protein A spin plates (ThermoFisher), quantified, and purity tested using SDS-PAGE. The effect of these mutations was compared to wild type IL-2 (with C125A mutation) on STAT5 phosphorylation in CD8 positive PBMCs, as described earlier. Based on these responses, mutations were classified in four categories (FIGS. 40A-D):
[1002] i. No effect mutations (0-10-fold loss in activity)
[1003] ii. Modest effect mutations (10-50-fold loss in activity)
[1004] iii. Medium effect mutations (50-500-fold loss in activity)
[1005] iv. Strong mutations (>500-fold loss in activity) or in case of Q126D almost complete loss in activity

[1006] Subsequently, an Octet set-up was used to investigate to what extent the Q126 mutations affect the interaction/binding of IL-2 to the IL-2R alpha chain. In brief: biotinylated CD25 (IL-2R alpha) was loaded onto streptavidin sensors, association and dissociation of two concentrations (50 and 10 nM) CD8 VHH-hFc3+hFc4-IL-2, or Q126 mutants thereof were monitored and used to calculate the association and dissociation constants and hence affinity. Data in FIGS. 41A-S illustrate that most mutations do not affect this interaction, with two exceptions: mutations Q126F (10-fold decrease in affinity, due to lower on-rate) and Q126P, which almost completely abolishes binding. The latter suggesting that the proline substitution results in a conformational shift that is influencing other parts of the IL-2 molecule.

[1007] The table below provides association and dissociation constants and also affinity:

| | KD (M) | ka (1/Ms) | kdis (1/s) |
|---|---|---|---|
| CD8 VHH-Fc-hIL-2_C125A | 3.23E−08 | 2.36E+05 | 7.64E−03 |
| CD8 VHH-Fc-hIL-2_C125A | 2.61E−08 | 2.51E+05 | 6.56E−03 |
| CD8 VHH-Fc-hIL-2_C125A_Q126A | 1.91E−08 | 4.74E+05 | 9.06E−03 |
| CD8 VHH-Fc-hIL-2_C125A_Q126A | 1.50E−08 | 4.64E+05 | 6.95E−03 |
| CD8 VHH-Fc-hIL-2_C125A_Q126D | 2.08E−08 | 3.45E+05 | 7.16E−03 |
| CD8 VHH-Fc-hIL-2_C125A_Q126E | 1.35E−08 | 5.65E+05 | 7.61E−03 |
| CD8 VHH-Fc-hIL-2_C125A_Q126F | 1.02E−07 | 4.41E+04 | 4.49E−03 |
| CD8 VHH-Fc-hIL-2_C125A_Q126G | 2.20E−08 | 3.10E+05 | 6.82E−03 |
| CD8 VHH-Fc-hIL-2_C125A_Q126H | 1.78E−08 | 4.10E+05 | 7.31E−03 |
| CD8 VHH-Fc-hIL-2_C125A_Q126I | 2.68E−08 | 2.45E+05 | 6.55E−03 |
| CD8 VHH-Fc-hIL-2_C125A_Q126K | 1.36E−08 | 5.28E+05 | 7.21E−03 |
| CD8 VHH-Fc-hIL-2_C125A_Q126L | 3.19E−08 | 2.04E+05 | 6.49E−03 |
| CD8 VHH-Fc-hIL-2_C125A_Q126M | 2.54E−08 | 2.93E+05 | 7.46E−03 |
| CD8 VHH-Fc-hIL-2_C125A_Q126N | 1.60E−08 | 5.95E+05 | 9.52E−03 |
| CD8 VHH-Fc-hIL-2_C125A_Q126P | NA | NA | NA |
| CD8 VHH-Fc-hIL-2_C125A_Q126R | 1.26E−08 | 5.42E+05 | 6.82E−03 |
| CD8 VHH-Fc-hIL-2_C125A_Q126S | 1.83E−08 | 4.82E+05 | 8.82E−03 |
| CD8 VHH-Fc-hIL-2_C125A_Q126T | 1.90E−08 | 4.76E+05 | 9.03E−03 |
| CD8 VHH-Fc-hIL-2_C125A_Q126V | 2.44E−08 | 3.29E+05 | 8.03E−03 |
| CD8 VHH-Fc-hIL-2_C125A_Q126W | 5.38E−08 | 1.14E+05 | 6.10E−03 |
| CD8 VHH-Fc-hIL-2_C125A_Q126Y | 2.83E−08 | 2.88E+05 | 8.14E−03 |

[1008] Based on both datasets, one mutation of each of the above categories (modest: Q126Y, medium: Q126G and strong: Q1261) were retained for further analysis in the following examples.

[1009] The following amino acid sequences were used in the Example:
[1010] hCD8 VHH-hFc3 (SEQ ID NO: 501)
[1011] hFc4-hIL-2_C125A (SEQ ID NO: 502)
[1012] hFc4_C125A_Q126A (SEQ ID NO: 503)
[1013] hFc4_C125A_Q126D (SEQ ID NO: 504)
[1014] hFc4_C125A_Q126E (SEQ ID NO: 505)
[1015] hFc4_C125A_Q126F (SEQ ID NO: 506)
[1016] hFc4_C125A_Q126G (SEQ ID NO: 507)
[1017] hFc4_C125A_Q126H (SEQ ID NO: 508)
[1018] hFc4_C125A_Q1261 (SEQ ID NO: 509)
[1019] hFc4_C125A_Q126K (SEQ ID NO: 510)
[1020] hFc4_C125A_Q126L (SEQ ID NO: 511)
[1021] hFc4_C125A_Q126M (SEQ ID NO: 512)
[1022] hFc4_C125A_Q126N (SEQ ID NO: 513)
[1023] hFc4_C125A_Q126P (SEQ ID NO: 514)
[1024] hFc4_C125A_Q126R (SEQ ID NO: 515)
[1025] hFc4_C125A_Q126S (SEQ ID NO: 516)
[1026] hFc4_C125A_Q126T (SEQ ID NO: 517)
[1027] hFc4_C125A_Q126V (SEQ ID NO: 518)
[1028] hFc4_C125A_Q126W (SEQ ID NO: 519)
[1029] hFc4_C125A_Q126Y (SEQ ID NO: 520)

### Example 15: Combination of Alpha and Gamma Mutations

[1030] In analogy with the combinations alpha:beta, the alpha mutation (R38A_F42K) was combined with three selected gamma mutations (Q126G, Q1261 and Q126Y) in de ALN2 warhead. The three resulting ALN2's were produced, purified and tested for STAT5 phosphorylation in CD8+ and Treg PBMC subsets of three different healthy donors as described earlier. Results in FIGS. 42A-D illustrate that:
[1031] As observed previously: Tregs are 4 logs more sensitive than CD8+ cells to IL-2
[1032] In contrast, CD8+ cells are about 3 logs more sensitive than Tregs to ALN2's with any of the combined alpha:gamma mutations.
[1033] The combination with the strong Q1261 mutation allows clear signaling in the CD8+ cells while STAT5 phosphorylation in Treg cells is absent almost up to 10 μg/mL.

[1034] The following amino acid sequences were used in the Example:
[1035] hCD8 VHH-hFc3 (SEQ ID NO: 521)
[1036] hFc4-IL-2_R38A_F42K_Q126G (SEQ ID NO: 522)
[1037] hFc4-IL-2_R38A_F42K_Q126I (SEQ ID NO: 523)
[1038] hFc4-IL-2_R38A_F42K_Q126Y (SEQ ID NO: 524)

### Example 16: Combination of Beta and Gamma Mutations for Selectivity Towards Activated CD8 Cells

[1039] A first major shortcoming of the use of no-alpha IL-2 variants (see above) in the treatment of cancer is that these molecules are not able to compete with endogenously expressed IL-2 for binding the IL-2R alpha chain. Indeed, activation of mainly CD4⁺, but also CD8⁺, cells results in the secretion of IL-2 in a tumor setting. This ‘newly secreted’ IL-2 will preferentially activate IL-2R alpha expressing cells, like Tregs, resulting in dampening of the anti-tumor response. A second disadvantage is that no-alpha molecules cannot take advantage of the fact that activated CTL's have upregulated IL-2R alpha levels, and IL-2R alpha remains the driving force of IL-2R activation. Based on these two concepts, the potential of combining a beta A-Kine mutation (here D20E) with a gamma common A-Kine mutations (here Q126G or Q126Y) in the IL-2 warhead was evaluated.

[1040] To mimic the activation (and thus up-regulation of CD25) of CD8+ cells, freshly isolated PBMC of healthy donors were treated with TransAct (nanomatrix conjugated with recombinant humanized CD3 and CD28 agonists; Miltenyi Biotec) for two days, prior to stimulation with the D20E_Q126G or D20E_Q126Y ALN2 variants, with STAT5 phosphorylation as functional read-out. What can be appreciated from FIGS. 43A-D is that while both beta:gamma mutants are more active (approximately a 10-fold) on Treg compared to CD8⁺ cells, this sensitivity is completely reversed on activated PBMCs. Here, likely due to the up-regulation of IL-2R alpha, the CD8⁺ cells become hyper-sensitive to the beta:gamma ALN2 variants. These data illustrate that these ALN2 variants are selective for activated CD8 positive cells.

[1041] The following amino acid sequences were used in the Example:
[1042] hCD8 VHH-hFc3 (SEQ ID NO: 297)
[1043] hFc4-IL-2_D20E_Q126G (SEQ ID NO: 382)
[1044] hFc4-IL-2_D20E_Q126Y (SEQ ID NO: 395)
[1045] hFc4-hIL-2_C125A (SEQ ID NO: 482)

### Example 17: CD8-Fc-ALN2 is Specific and Superior to Wild Type FC-IL-2 to Activate and Proliferate CD8-Positive T Cells

[1046] C57BI/6J mice (female, 9 weeks old) were injected subcutaneously (s.c.) with 6E+5 MC38 cells. Seven days later, treatments were started: mice received intravenously (i.v.) either (1) buffer, (2) targeted CD8-Fc-ALN2 (12.5 μg/mouse), (3) an equimolar dose of untargeted Fc-ALN2 (10.7 μg/mouse) or (4) an equimolar dose of wild type Fc-IL2 (10.7 μg/mouse). One day later, spleens and tumors were removed for intracellular analysis of STAT5 phosphorylation (documenting IL-2 receptor signaling), as well as membrane CD69 and CD25 expression (documenting activation) in CD8− or CD4-positive T cells. The results plotted in FIG. 44 show that while untargeted Fc-ALN2 did not induce pSTAT5, CD69, or CD25 in CD8-positive T cells, the CD8-Fc-ALN2 construct did so very robustly and surprisingly in general even more efficiently than wild type Fc-ALN2. In contrast, wild type Fc-IL2 was very efficient to induce STAT5 phosphorylation in CD4 and FoxP3-positive regulatory T cells (Treg) and other (FoxP3-negative) CD4-positive T cells. Importantly, CD8-Fc-ALN2 did not have any effect on the FoxP3-positive regulatory T cells (Treg) or even reduced activation of these cells as evidenced by the pSTAT5 data.

[1047] To evaluate T cell proliferation, lymphocytes were counted in circulation (using a Vetscan HMS, Zoetis), as well as in spleen and tumor (via flow cytometry) 14 days after tumor inoculation, which is 1 week after the start of the treatment, i.e. after 2 treatments on days 7 and 10. The results plotted in FIG. 45 show that both in blood and in spleen, targeted CD8-Fc-ALN2 was the only treatment that efficiently caused lymphocyte proliferation (in contrast to untargeted Fc-ALN2 and wild type Fc-IL2, injected in equimolar amount). In tumor tissue, wild type Fc-IL2 was capable of increasing CD8-positive T cell numbers. Adding anti-PD-1 Ab treatment further augmented CD8-Fc-ALN2 induced lymphocyte proliferation in circulation and in tumor tissue but surprisingly did not do so with Fc-IL2.

[1048] Furthermore, in spleens collected 3 days after treatment, 25 μg CD8-Fc-ALN2 was much better than the equimolar 21.7 μg wild type Fc-IL2 to enhance CD25 expression (and thus activation) in CD8-positive T cells (70% vs 20%, respectively), while only wild type Fc-IL2 induced CD25 expression in CD4-positive T cells (see FIG. 46).

[1049] The following amino acid sequences were used in the Example:
[1050] mCD8 VHH-hFc3 (SEQ ID NO: 495)
[1051] hFc4-hIL-2_R38A_F42K_N88G_C125A (SEQ ID NO: 335)
[1052] hFc3 (SEQ ID NO: 369)
[1053] hFc4-hIL-2_C125A (SEQ ID NO: 482)

### Example 18: Efficacy of CD8-Fc-ALN2 in A20, B16, and Panc02 Tumor Models

[1054] The anti-tumor efficacy of the mouse CD8-targeted ALN2 variant (CD8-Fc-ALN2) with combined alpha:beta mutations R38A_F42K_N88G was previously shown to be very successful in two syngeneic murine models for colon cancer, MC38 and CT26. In addition, the anti-tumoral efficacy was analyzed in 3 other tumor models: lymphoma A20, melanoma B16F10, and pancreatic adenocarcinoma Panc02. For this experiment, Balb/c mice (female, 9 weeks old) were inoculated subcutaneously (s.c.) with 6E+5 A20 cells and treatment started on day 10, or C57BI/6J (female, 9 weeks old) with 6E+5 B16F10 or Panc02 cells and treatment started on day 6.

[1055] Firstly, A20 tumor-bearing mice were treated intravenously (i.v.) with either (1) buffer, (2) targeted CD8-Fc-ALN2 (12.5 μg/mouse) as a monotherapy, (3) or targeted CD8-Fc-ALN2 (12.5 μg/mouse) in combination with 200 μg/mouse anti-PD-1 Ab, or (4) untargeted wild type Fc-IL2 (equimolar 10.7 μg/mouse), on days 10, 14 and 17 after tumor inoculation. Tumor sizes (means+/−SEM; n=5 per group) were plotted in FIG. 47. FIG. 47 shows that both untargeted wild type Fc-IL-2 and targeted CD8-Fc-ALN2 substantially inhibited tumor growth, but the wild-type Fc-IL-2 treated mice all succumbed after the second treatment (indicated in FIG. 47 as “5/5+” or all animals died). This result contrasts with the CD8-Fc-ALN2 treated mice, documenting the extreme susceptibility of Balb/c mice for wild type IL-2 toxic side effects, but not for CD8-Fc-ALN2. At the end of the experiment, 4 out of 5 CD8-Fc-ALN2 treated animals were completely tumor-free. Extra treatment with anti-PD-1 could initially not increase CD8-Fc-ALN2 efficacy; also, in this group 4 out of 5 mice were tumor-free but this changed after an additional two months follow up. At this later time point, six mice (2 from the group treated with CD8-Fc-ALN2 and 4 from the group treated with CD8-Fc-ALN2+anti-PD1) were still tumor-free and re-challenged with A20 tumor cells on the other flank. All 6 mice remained tumor-free and did not develop a new tumor, in contrast to naïve mice inoculated with the same A20 cells on the same day.

[1056] Secondly, B16F10 tumor-bearing mice were treated i.v. with either (1) buffer, (2) targeted CD8-Fc-ALN2 (12.5 μg/mouse) or (3) untargeted Fc-ALN2 (equimolar 10.7 μg/mouse) on days 6, 9 and 13 after tumor inoculation. Tumor sizes on day 16 after inoculation (means+/−SEM; n=4-5 per group) were plotted in FIG. 48. CD8-Fc-ALN2 substantially slowed down tumor growth while the untargeted ALN2 had no effect.

[1057] Finally, Panc02 tumor-bearing mice were treated i.v. with either (1) buffer, (2) targeted CD8-Fc-ALN2 (12.5 μg/mouse) or (3) untargeted Fc-ALN2 (equimolar 10.7 μg/mouse) on days 6 and 13 after tumor inoculation. Tumor sizes on day 16 after inoculation (means+/−SEM; n=5 per group) were plotted in FIG. 49. CD8-Fc-ALN2 substantially slowed down tumor growth which was not observed with the untargeted ALN2.

[1058] The following amino acid sequences were used in the Example:
[1059] mCD8 VHH-hFc3 (SEQ ID NO: 495)
[1060] hFc4-hIL-2_R38A_F42K_N88G_C125A (SEQ ID NO: 335)
[1061] hFc3 (SEQ ID NO: 369)

### Example 19: Tumor Targeting of ALN2

[1062] In this example the potential of targeting ALN2 activity to tumor (or other immune cells) using a PD-L1 VHH was evaluated. PD-L1-Fc-ALN2 protein was made by transfection of ExpiCHO cells with following plasmid combination and purified as described earlier:
[1063] PD-L1-Fc-IL-2_R38A_F42K_N88G: mPD-L1 VHH-hFc3+hFc4-IL-2_R38A_F42K_N88G

[1064] The potency and specificity of the PD-L1 ALN2 was verified on mouse splenocytes by analyzing phosphorylation of STAT5 as described in Example 13. FIG. 50 shows that an untargeted Fc-ALN2 does not induce pSTAT5 in mouse splenocytes up to 10 μg/ml, while PD-L1 targeting is able to induce a pSTAT5 signal similar as WT IL-2.

[1065] To test efficacy the MC38 tumor-model, which is a PD-L1 expressing tumor, PD-L1 targeted ALN2 was selected. C57BI/6J mice (female, 9 weeks old) were injected s.c. with 6E+5 MC38 cells. Six days later, treatments were started: mice received intravenously (i.v.) either (1) buffer, (2) targeted Fc-ALN2 (with IL-2 mutations R38A_F42K_N88G; 12.5 μg/mouse), or (3) untargeted Fc-ALN2, three times (on days 6, 9 and 13). Tumor sizes on day 17 after inoculation (means+/−SEM; n=4-6 per group) were plotted in FIG. 51 showing a specific tumor growth inhibition by the PD-L1 targeted ALN2 only.

[1066] In addition, an ALN2 targeted to the extracellular tumor matrix (based on a TenascinC-A1 specific VHH) in a cancer context was generated. This TNC-Fc-ALN2 protein was made by transfection of ExpiCHO cells with the following plasmid combinations and purified as described above:
[1067] TNC-Fc-IL-2_R38A_F42K_N88G: mTNC VHH-hFc3+hFc4-IL-2_R38A_F42K_N88G

[1068] To test efficacy in the MC38 tumor-model, C57BI/6J mice (female, 9 weeks old) were injected s.c. with 6E+5 MC38 cells. Six days later, treatments were started: mice received intravenously (i.v.) either (1) buffer, (2) untargeted Fc-ALN2, or (3) TNCA1 targeted Fc-ALN2 (with IL-2 mutations R38A_F42K_N88G; 12.5 μg/mouse), three times (on days 6, 9 and 13). Tumor sizes were measured three times a week and means+/−SEM (n=4-6) were plotted in FIG. 52. When mentioned, the ALN2 treatment was supplemented by intraperitoneal injection (i.p.) anti-PD-1 Ab treatments (200 μg/mouse) on the same days as the i.v. treatments. As can be appreciated, in combination with anti-PD-1 Ab therapy and in contrast to untargeted Fc-ALN2, TNC-targeted Fc-ALN2 treatments clearly and substantially inhibited tumor growth. Surprisingly, at day 21, only for TNC-Fc-ALN2+PD-L1 treated group a number of mice without detectable tumor were identified, i.e. in three out of 6 animals.

### Example 20: Bispecific Targeting of ALN2

[1069] A FAP targeted ALN2, NKp46 targeted ALN2, and the following bi-specific ALN2s were generated and purified from ExpiCHO supernatant as described earlier:
[1070] NKp46-Fc-ALN2 (combination of NKp46 VHH-hFc3 (sequence below)+hFc4-hIL-2_R38A_F42K_N88G). This construct targets ALN2 to NK cells.
[1071] NKp46-CD8-Fc-ALN2 (combination of NKp46 VHH-hFc3+CD8 VHH-hFc4-hIL-2_R38A_F42K_N88G; sequences below). This construct targets ALN2 to both NK and CD8 cells.
[1072] FAP-Fc-ALN2 (combination of FAP VHH-hFc3 (sequence below)+hFc4-hIL-2_R38A_F42K_N88G). This construct targets ALN2 to the tumor or cancer-associated fibroblasts via the FAP specific VHH.
[1073] FAP-CD8-Fc-ALN2 (combination of FAP VHH-hFc3+CD8 VHH-hFc4-hIL-2_R38A_F42K_N88G; sequences below). This construct targets ALN2 to the tumor or cancer-associated fibroblasts via the FAP specific VHH and to CD8 cells.

[1074] The potency and specificity of the NKp46-CD8-ALN2 was verified on mouse splenocytes by analyzing phosphorylation of STAT5 as described in Example 13. FIG. 53 shows that an untargeted Fc-ALN2 does not induce pSTAT5 in CD8 cells up to 10 μg/ml and only marginally in NK cells with an EC50 estimated (extrapolated data as max signal not reached at 10 μg/ml) at about 5 μg/mL. CD8 and NK cells can be simultaneously stimulated by the bispecific construct with EC50s of respectively about 46 (>200-fold window vs untargeted) and 2 ng/ml (about 2500-fold window vs untargeted) which is at least as similar as the CD8 or NKp46 monospecific ALN2s.

[1075] As a follow-on to above experiment, 2 more bi-specific constructs were generated and purified from ExpiCHO supernatant as described earlier:
[1076] CD8_PD-1_Fc-ALN2 (combination of PD-1 VHH-hFc3+CD8 VHH-hFc4-hIL-2_R38A_F42K_N88G).
[1077] CD8_PD-L1_Fc-ALN2 (combination of PD-L1 VHH-hFc3+CD8 VHH-hFc4-hIL-2_R38A_F42K_N88G)

[1078] These constructs are evaluated for their anti-tumoral effect in mice bearing an MC38 tumor. These mice are treated once i.v. when tumor size is about 100-200 mm³ or repeatedly with a 3-4 day interval and tumor size is assessed every 2 to 3 days.

[1079] Sequences used in this experiment:
[1080] mNKp46 VHH-hFc3 (SEQ ID NO: 525)
[1081] mFAP VHH-hFc3 (SEQ ID NO: 526)
[1082] mPD-L1 VHH-hFc3 (SEQ ID NO: 527)
[1083] mTNC VHH-hFc3 (SEQ ID NO: 528)
[1084] mCD8 VHH-hFc4-hIL-2_R38A_F42K_N88G_C125A (SEQ ID NO: 529)
[1085] mPD-1 VHH-hFc3 (SEQ ID NO: 530)

### Example 21: Activation of CD8 Cells with D20E and N88G CD8-Fc-ALN2 Variants

[1086] Human CD8 targeted IL-2 variants with a combination of “no_alpha” mutations that ablate activity at the IL-2R alpha chain (R38A_F42K) and a recoverable loss-of-function beta mutation hCD8-Fc-ALN2_N88G or hCD8-Fc-ALN2_D20E) were evaluated for their selective activation by analyzing the cell-surface expression of the activation-markers CD25 (IL-2R alpha chain), and PD-1 in FACS. Expression was monitored after five days in three PBMC donors. Data (average of the three donors) are plotted in FIG. 54 and clearly show that CD8 targeting of these mutants allows selective up-regulation (and thus activation) of these markers in CD8-positive vs. off-target cells.

[1087] Also, in immune-deficient mice provided with a human immune system (HIS mice) bearing an MDA-MB-231 tumor, the same human CD8 targeted ALN2 molecules efficiently and specifically induced STAT5 phosphorylation (analyzed 45 minutes after injection) in only CD8-positive T lymphocytes (FIG. 55). Humanized HIS mice were obtained via irradiation and intrahepatic injection of NSG 2-day-old pups with human cord blood CD34-positive stem cells; the tumor-bearing HIS mice were used for intravenous hCD8-Fc-ALN2 injection at the age of 6 months. Similar to the human CD8 targeted variants, mouse CD8-targeted Fc-ALN2 variants were generated with a combination of “no_alpha” mutations with the beta chain recoverable loss-of-function mutations D20E or N88G (which has been used in previous examples) as follows:
[1088] mCD8-Fc-IL-2_R38A_F42K_D20E: mCD8 VHH-hFc3+hFc4-IL-2_R38A_F42K_D20E
[1089] mCD8-Fc-IL-2_R38A_F42K_N88G: mCD8 VHH-hFc3+hFc4-IL-2_R38A_F42K_N88G

[1090] Variants were expressed and purified as described above and tested on mouse splenocytes for the activation of CD8-positive cells by measuring up-regulation of cell surface expression of CD25 after 6 days (FIG. 56). Both R38A_F42K_D20E and R38A_F42K_N88G variants clearly increase expression of this activation marker in a selective and comparable manner, i.e. clear effects in CD8-positive but not in off-target (CD8 negative) cells.

[1091] The following amino acid sequences were used in the Example:
[1092] mCD8 VHH-hFc3 (SEQ ID NO: 495)
[1093] hCD8 VHH-hFc3 (SEQ ID NO: 483)
[1094] hFc4-hIL-2_R38A_F42K_N88G_C125A (SEQ ID NO: 335)
[1095] hFc4-IL-2_R38A_F42K_D20E (SEQ ID NO: 332)

### Example 22: Antitumoral Effect of D20E and N88G CD8-ALN2 Variants

[1096] For evaluation in the MC38 tumor model, C57BI/6J mice (female, 9 weeks old) were injected s.c. with 6E+5 MC38 cells. Six days later, treatments were started: mice received i.v. either (1) buffer, (2) targeted CD8-Fc-ALN2 (12.5 μg/mouse), or (3) equimolar amount of untargeted Fc-ALN2 (10.7 μg/mouse), twice on days 6 and 9.
[1097] CD8-Fc-IL-2_R38A_F42K_D20E: mCD8 VHH-hFc3 (SEQ ID NO: 495)+hFc4-IL-2_R38A_F42K_D20E (SEQ ID NO: 333)
[1098] CD8-Fc-IL-2_R38A_F42K_N88G: mCD8 VHH-hFc3 (SEQ ID NO: 495)+hFc4-IL-2_R38A_F42K_N88G (SEQ ID NO: 335)
[1099] Fc-IL-2_R38A_F42K_N88G: VHH-hFc3 (SEQ ID NO: 369)+hFc4-IL-2_R38A_F42K_N88G (SEQ ID NO: 335)
[1100] Fc-IL-2_R38A_F42K_N88G: VHH-hFc3 (SEQ ID NO: 369)+hFc4-IL-2_R38A_F42K_D20E (SEQ ID NO: 332)

[1101] Tumor sizes were measured three times a week and average growth curves were plotted in FIG. 57 and indicate that D20E-based CD8-Fc-ALN2 was at least as efficient as N88G-based CD8-Fc-ALN2 in the absence of an effect by both untargeted counterparts.

### Example 23: In Vivo Evaluation of Alpha:Gamma ALN2 in the MC38 Tumor Model

[1102] In this example, the anti-tumor efficacy of “no_alpha” mutations in combination with a recoverable loss-of-function gamma mutation was analyzed. The following constructs were expressed, purified, and tested for STAT5 phosphorylation in primary splenocytes as described earlier:
[1103] CD8-Fc-IL-2_R38A_F42K_Q126G: mCD8 VHH-hFc3 (SEQ ID NO. 495)+hFc4-IL-2_R38A_F42K_Q126G (SEQ ID NO. 522)
[1104] CD8-Fc-IL-2_R38A_F42K_Q1261: mCD8 VHH-hFc3 (SEQ ID NO. 495)+hFc4-IL-2_R38A_F42K_Q126| (SEQ ID NO. 523)
[1105] CD8-Fc-IL-2_R38A_F42K_Q126Y: mCD8 VHH-hFc3 (SEQ ID NO. 495)+hFc4-IL-2_R38A_F42K_Q126Y (SEQ ID NO. 524)

[1106] Data in FIG. 58, show that the combination of “no_alpha” mutations and Q126G or Q126Y resulted in ALN2 variants with comparable activity (EC50 of 90 and 110 ng/ml, respectively) and selectivity towards CD8-positive mouse cells (almost no pSTAT5 in Treg cells). The Q1261 mutations cannot be recovered at concentrations at or below 10 μg/mL in a mouse context, resulting in a variant devoid of almost all activity (and this in contrast to the effect on human PBMC's in the earlier example). The variant CD8-Fc-IL-2_R38A_F42K_Q126G was subsequently evaluated in vivo.

[1107] For evaluation in vivo, C57BI/6J mice (female, 9 weeks old) were injected s.c. with 6E+5 MC38 cells. Six days later, treatments were started: mice received i.v. (1) buffer, (2) CD8-Fc-ALN2 (12.5 μg/mouse), (3) CD8-Fc-ALN2 (4.17 μg/mouse), (4) equivalent untargeted ALN2 (12.5 μg/mouse), or (4) equivalent untargeted ALN2 (3.57 μg/mouse), on days 6, 9 and 13. Tumor sizes at day 17 (i.e. 4 days after the last treatment) were plotted in FIG. 59 as means+/−SEM (n=7). As can be seen in FIG. 59, the alpha:gamma ALN2 is dose-dependently able to substantially delay tumor growth with superior effects for the CD8 targeted ALN2.

### Example 24: In Vivo Evaluation of the Beta:Gamma Combination

[1108] The ALN2 variant CD8-Fc-IL-2_N88G_Q126G (mCD8 VHH-hFc3 (SEQ ID NO: 495)+hFc4-IL-2_N88G_Q126G) was expressed in ExpiCHO and purified from the supernatant as described earlier:
[1109] hFc4-IL-2_R38A_F42K_N88G_C125A_Q126G (SEQ ID NO: 531)

[1110] For evaluation in vivo, C57BI/6J mice (female, 9 weeks old) were injected s.c. with 6E+5 MC38 cells. Six days later, treatments were started: mice received i.v. (1) buffer, (2) CD8-Fc-ALN2 (4.17 μg/mouse), (3) CD8-Fc-ALN2 (1.4 μg/mouse), (4) equivalent untargeted ALN2 (3.57 μg/mouse), or (4) equivalent untargeted ALN2 (1.19 μg/mouse), on days 6, 9 and 13. Tumor sizes at day 17 (i.e. 4 days after the last treatment) were plotted in FIG. 60 as means+/−SEM (n=7). As can be seen FIG. 60, the beta:gamma ALN2 is dose-dependently able to substantially delay tumor growth with superior effects for the CD8 targeted ALN2.

### Example 25: Screening of IL-2 Variants to Specifically Target Cells Expressing the IL-2R Alpha Chain

[1111] In previous examples, beta (D20 or N88) and gamma (Q126) attenuating mutations were combined to make a beta:gamma ALN2 variant with an intact IL-2R alpha binding-site and CD8 targeting was used to increase selectivity towards activated CD8-positive cells over e.g. Tregs. Unfortunately, such ALN2 variants were expressing poorly. Hence, as an alternative for the combination of a beta and gamma mutation, the beta mutations (D20 and N88) that appeared non-recoverable in Example 3 were rescreened. The initial screening of beta-mutants in Example 3 was done on ‘resting’ or non-activated CD8 positive PBMC's, which are negative for the IL-2R alpha expression. In this example, the D20 and N88 mutants were re-screened on cells expressing a functional trimeric alpha:beta:gamma IL-2 receptor. To this end, signaling in HEK-Blue IL-2 cells (InvivoGen) stably expressing either human CD8 (HEK-Blue CD8) or human NKp46 (HEK-Blue NKp46) was analyzed. Data for the D20 (FIG. 61) and N88 (FIG. 62) variants surprisingly illustrate that for a number of mutants (e.g. the D20F, D20G, D20H, D20I, D20K, D20L, D20N, N88E, N88I, N88K, N88Q, N88R, and N88V) there is a clear attenuation of signaling (compared to CD8-Fc-IL2) and that this loss in activity can be, at least in part, restored upon CD8 targeting (HEK-Blue CD8 vs HEK-Blue NKp46 cells), while this was not the case for these mutants when screened on the functional dimeric beta:gamma IL-2 receptor.

### EQUIVALENTS

[1112] While the invention has been described in connection with specific embodiments thereof, it will be understood that it is capable of further modifications and this application is intended to cover any variations, uses, or adaptations of the invention following, in general, the principles of the invention and including such departures from the present disclosure as come within known or customary practice within the art to which the invention pertains and as may be applied to the essential features hereinbefore set forth and as follows in the scope of the appended claims.

[1113] Those skilled in the art will recognize, or be able to ascertain, using no more than routine experimentation, numerous equivalents to the specific embodiments described specifically herein. Such equivalents are intended to be encompassed in the scope of the following claims.

### INCORPORATION BY REFERENCE

[1114] All patents and publications referenced herein are hereby incorporated by reference in their entireties.

[1115] The publications discussed herein are provided solely for their disclosure prior to the filing date of the present application. Nothing herein is to be construed as an admission that the present invention is not entitled to antedate such publication by virtue of prior invention.

[1116] As used herein, all headings are simply for organization and are not intended to limit the disclosure in any manner. The content of any individual section may be equally applicable to all sections.

The application's sequence listing, which the Patent Office published only in electronic form, follows.

SEQUENCE LISTING (531 sequences)

SEQ ID NO: 1 - protein, 133 aa, Artificial Sequence [sequence omitted]

SEQ ID NO: 2 - protein, 100 aa, Artificial Sequence
  Synthetic polymer.
PKKKIQLHAEHALYDALMILNIVKTNSPPAEEKLEDYAFNFELILEEIARLFESGDQKDEAEKAKRMKEWMKRIKTTASEDEQEEMANAIITILQSWIFS

SEQ ID NO: 3-6 - skipped (4 entries)

SEQ ID NO: 7 - protein, 447 aa, Artificial Sequence
  Synthetic Sequence
QVQLVQSGVEVKKPGASVKVSCKASGYTFTNYYMYWVRQAPGQGLEWMGGINPSNGGTNFNEKFKNRVTLTTDSSTTTAYMELKSLQFDDTAVYYCARRDYRFDMGFDYWGQGTTVTVSSASTKGPSVFPLAPCSRSTSESTAALGCLVKDYFPEPVTVSWNSGALTSGVHTFPAVLQSSGLYSLSSVVTVPSSSLGTKTYTCNVDHKPSNTKVDKRVESKYGPPCPPCPAPEFLGGPSVFLFPPKPKDTLMISRTPEVTCVVVDVSQEDPEVQFNWYVDGVEVHNAKTKPREEQFNSTYRVVSVLTVLHQDWLNGKEYKCKVSNKGLPSSIEKTISKAKGQPREPQVYTLPPSQEEMTKNQVSLTCLVKGFYPSDIAVEWESNGQPENNYKTTPPVLDSDGSFFLYSRLTVDKSRWQEGNVFSCSVMHEALHNHYTQKSLSLSLGK

SEQ ID NO: 8 - protein, 218 aa, Artificial Sequence
  Synthetic Sequence
EIVLTQSPATLSLSPGERATLSCRASKGVSTSGYSYLHWYQQKPGQAPRLLIYLASYLESGVPARFSGSGSGTDFTLTISSLEPEDFAVYYCQHSRDLPLTFGGGTKVEIKRTVAAPSVFIFPPSDEQLKSGTASVVCLLNNFYPREAKVQWKVDNALQSGNSQESVTEQDSKDSTYSLSSTLTLSKADYEKHKVYACEVTHQGLSSPVTKSFNRGEC

SEQ ID NO: 9 - protein, 440 aa, Artificial Sequence
  Synthetic Sequence
QVQLVESGGGVVQPGRSLRLDCKASGITFSNSGMHWVRQAPGKGLEWVAVIWYDGSKRYYADSVKGRFTISRDNSKNTLFLQMNSLRAEDTAVYYCATNDDYWGQGTLVTVSSASTKGPSVFPLAPCSRSTSESTAALGCLVKDYFPEPVTVSWNSGALTSGVHTFPAVLQSSGLYSLSSVVTVPSSSLGTKTYTCNVDHKPSNTKVDKRVESKYGPPCPPCPAPEFLGGPSVFLFPPKPKDTLMISRTPEVTCVVVDVSQEDPEVQFNWYVDGVEVHNAKTKPREEQFNSTYRVVSVLTVLHQDWLNGKEYKCKVSNKGLPSSIEKTISKAKGQPREPQVYTLPPSQEEMTKNQVSLTCLVKGFYPSDIAVEWESNGQPENNYKTTPPVLDSDGSFFLYSRLTVDKSRWQEGNVFSCSVMHEALHNHYTQKSLSLSLGK

SEQ ID NO: 10 - protein, 214 aa, Artificial Sequence
  Synthetic Sequence
EIVLTQSPATLSLSPGERATLSCRASQSVSSYLAWYQQKPGQAPRLLIYDASNRATGIPARFSGSGSGTDFTLTISSLEPEDFAVYYCQQSSNWPRTFGQGTKVEIKRTVAAPSVFIFPPSDEQLKSGTASVVCLLNNFYPREAKVQWKVDNALQSGNSQESVTEQDSKDSTYSLSSTLTLSKADYEKHKVYACEVTHQGLSSPVTKSFNRGEC

SEQ ID NO: 11 - protein, 106 aa, Artificial Sequence
  Synthetic Sequence
EIVLTQSPSSLSASVGDRVTITCSARSSVSYMHWYQQKPGKAPKLLIYRTSNLASGVPSRFSGSGSGTDFTLTINSLQPEDFATYYCQQRSSFPLTFGGGTKLEIK

SEQ ID NO: 12 - protein, 106 aa, Artificial Sequence
  Synthetic Sequence
EIVLTQSPSSLSASVGDRVTITCSARSSVSYMHWFQQKPGKAPKLWIYRTSNLASGVPSRFSGSGSGTDYTLTINSLQPEDFATYYCQQRSSFPLTFGGGTKLEIK

SEQ ID NO: 13 - protein, 106 aa, Artificial Sequence
  Synthetic Sequence
EIVLTQSPSSLSASVGDRVTITCSARSSVSYMHWFQQKPGKAPKLWIYRTSNLASGVPSRFSGSGSGTDYCLTINSLQPEDFATYYCQQRSSFPLTFGGGTKLEIK

SEQ ID NO: 14 - protein, 106 aa, Artificial Sequence
  Synthetic Sequence
EIVLTQSPSSLSASVGDRVTITCSARSSVSYMHWFQQKPGKAPKLWIYRTSNLASGVPSRFSGSGSGTSYCLTINSLQPEDFATYYCQQRSSFPLTFGGGTKLEIK

SEQ ID NO: 15 - protein, 117 aa, Artificial Sequence
  Synthetic Sequence
QVQLVQSGSELKKPGASVKISCKASGYSFSNYGMNWVRQAPGQGLQWMGWINTDSGESTYAEEFKGRFVFSLDTSVSTAYLQITSLTAEDTGMYFCAKVGYDALDYWGQGTLVTVSS

SEQ ID NO: 16 - protein, 117 aa, Artificial Sequence
  Synthetic Sequence
QVQLVQSGSELKKPGASVKISCKASGYTFTNYGMNWVRQAPGQGLQWMGWINTDSGESTYAEEFKGRFVFSLDTSVSTAYLQITSLTAEDTGMYFCAKVGYDALDYWGQGTLVTVSS

SEQ ID NO: 17 - protein, 117 aa, Artificial Sequence
  Synthetic Sequence
QVQLVQSGSELKKPGASVKISCKASGYTFTNYGMNWVRQAPGQGLQWMGWINTDSGESTYAEEFKGRFVFSLDTSVNTAYLQITSLTAEDTGMYFCVRVGYDALDYWGQGTLVTVSS

SEQ ID NO: 18 - protein, 117 aa, Artificial Sequence
  Synthetic Sequence
QIQLVQSGSELKKPGASVKISCKASGYTFTNYGMNWVRQAPGQGLQWMGWINTDSGESTYAEEFKGRFVFSLDTSVNTAYLQITSLTAEDTGMYFCVRVGYDALDYWGQGTLVTVSS

SEQ ID NO: 19 - protein, 117 aa, Artificial Sequence
  Synthetic Sequence
QIQLVQSGSELKKPGASVKISCKASGYTFTNYGMNWVKQAPGQGLKWMGWINTDSGESTYAEEFKGRFAFSLDTSVNTAYLQITSLNAEDTGMYFCVRVGYDALDYWGQGTLVTVSS

SEQ ID NO: 20 - protein, 254 aa, Artificial Sequence
  Synthetic Sequence
LFTVTVPKELYIIEHGSNVTLECNFDTGSHVNLGAITASLQKVENDTSPHRERATLLEEQLPLGKASFHIPQVQVRDEGQYQCIIIYGVAWDYKYLTLKVKASYRKINTHILKVPETDEVELTCQATGYPLAEVSWPNVSVPANTSHSRTPEGLYQVTSVLRLKPPPGRNFSCVFWNTHVRELTLASIDLQSQMEPRTHPTWLLHIFIPFCIIAFIFIATVIALRKQLCQKLYSSKDTTKRPVTTTKREVNSAI

SEQ ID NO: 21 - protein, 453 aa, Artificial Sequence
  Synthetic Sequence
MIFLLLMLSLELQLHQIAALFTVTVPKELYIIEHGSNVTLECNFDTGSHVNLGAITASLQKVENDTSPHRERATLLEEQLPLGKASFHIPQVQVRDEGQYQCIIIYGVAWDYKYLTLKVKASYRKINTHILKVPETDEVELTCQATGYPLAEVSWPNVSVPANTSHSRTPEGLYQVTSVLRLKPPPGRNFSCVFWNTHVRELTLASIDLQSQMEPRTHPTWEPKSCDKTHTCPPCPAPELLGGPSVFLFPPKPKDTLMISRTPEVTCVVVDVSHEDPEVKFNWYVDGVEVHNAKTKPREEQYNSTYRVVSVLTVLHQDWLNGKEYKCKVSNKALPAPIEKTISKAKGQPREPQVYTLPPSRDELTKNQVSLTCLVKGFYPSDIAVEWESNGQPENNYKTTPPVLDSDGSFFLYSKLTVDKSRWQQGNVFSCSVMHEALHNHYTQKSLSLSPGK

SEQ ID NO: 22 - protein, 22 aa, Artificial Sequence
  Synthetic Sequence
  MISC_FEATURE (8)..(8): A branch with sequence SNTSESF
SNTSESFKFRVTQLAPKAQIKE

SEQ ID NO: 23 - protein, 119 aa, Artificial Sequence
  Synthetic Sequence
EVQLQQSGPVLVKPGASVKMSCKASGYTFTDYYMNWVKQSHGKSLEWIGNINPYNGGTTYNQKFKGKATLTVDKSSRTAYMEINSLTSEDSAVYYCARGRIYDGSLDYWGQGTALTVSS

SEQ ID NO: 24 - protein, 106 aa, Artificial Sequence
  Synthetic Sequence
DIQMTQFPSSLCASQGGKVTVTCKASQDINNYMAWYQHKPGKGPRLLIHYTSTLLSGIPSRFSGSGSGRDYSFSISNLEPEDIATYYCLQYDNLWTFGGGTKLEIK

SEQ ID NO: 25 - protein, 116 aa, Artificial Sequence
  Synthetic Sequence
QVQLQQSGAELAKPGASVRLSCKASGYTFTNYWMHWVKQRPGQGLEWIGHINPSSGFTTYNQNFKDKATLTADKSSNTAYMQLSSLTYEDSAVYFCAREDYDVDYWGQGTTLTVSS

SEQ ID NO: 26 - protein, 107 aa, Artificial Sequence
  Synthetic Sequence
DIVMTQSQKFMSTSVGDRVSVTCKASQSVDTNVAWYQQKPGQSPKALIFSASYRYSGVPDRFTGSGSGTDFTLTINSVQSEDLAEYFCQQYNSYPYTFGSGTKLEIK

SEQ ID NO: 27 - protein, 122 aa, Artificial Sequence
  Synthetic Sequence
EVQLVESGGGLVKPGGSLKLSCAASGFTFSDYGMHWVRQAPEKGLEWVAYISSGSYTIYYTDTVKGRFTISRDNAKNTLFLQMTSLRSEDTAMYYCARRGYGSFYEYYFDYWGQGTTLTVSS

SEQ ID NO: 28 - protein, 106 aa, Artificial Sequence
  Synthetic Sequence
QIVLTQSPALMSASPGEKVTMTCSASSSVSYMYWYQQKPRSSPKPWIYLTSNLASGVPARFSGSGSGTSYSLTISSMEAEDAATYYCQQWSSNPFTFGSGTKLEIK

SEQ ID NO: 29 - protein, 119 aa, Artificial Sequence
  Synthetic Sequence
EVQLVESGGGLVQAGKSLRLSCAASGSIFSIHAMGWFRQAPGKEREFVAAITWSGGITYYEDSVKGRFTISRDNAKNTVYLQMNSLKPEDTAIYYCAADRAESSWYDYWGQGTQVTVSS

SEQ ID NO: 30 - protein, 119 aa, Artificial Sequence
  Synthetic Sequence
EVQLVESGGGLVQAGGSLRLSCAASGSIASIHAMGWFRQAPGKEREFVAVITWSGGITYYADSVKGRFTISRDNAKNTVYLQMNSLKPEDTAIYYCAGDKHQSSWYDYWGQGTQVTVSS

SEQ ID NO: 31 - protein, 119 aa, Artificial Sequence
  Synthetic Sequence
EVQLVESGGGLVQAGGSLRLSCAASGSISSIHAMGWFRQAPGKEREFVAAITWSGGITYYADSLKGRFTISRDNAKNTGYLQMNSLKPEDTAIYYCAADRAQSSWYDYWGQGTQVTVSS

SEQ ID NO: 32 - protein, 119 aa, Artificial Sequence
  Synthetic Sequence
EVQLVESGGGLVQAGGSLGLSCAASGSIFSINAMAWFRQAPGKEREFVALISWSGGSTYYEDSVKGRFTISRDNAKNTVYLQMNSLKPEDTAIYYCAADRVDSNWYDYWGQGTQVTVSS

SEQ ID NO: 33 - protein, 120 aa, Artificial Sequence
  Synthetic Sequence
EVQLVESGGGLVQAGGSLRLSCAASGRAFSSGTMGWFRRAPGKEREFVASIPWSGGRIYYADSVKGRFTISRDNAQNTVYLQMNSLKPEDTAVYYCAVKERSTGWDFASWGQCTQVTVSS

SEQ ID NO: 34 - protein, 121 aa, Artificial Sequence
  Synthetic Sequence
QVQLVQSGAELKQPGASVKMSCKASGYSFTSSWIHWVKQAPGQGLEWIGYIYPSTGFTEYNQKFKDRATLTADKSTSTAYMELSSLRSEDSAVYYCARWRDSSGYHAMDYWGQGTSVTVSS

SEQ ID NO: 35 - protein, 121 aa, Artificial Sequence
  Synthetic Sequence
QVQLVQSGAEVKQPGASVKMSCKASGYSFTSSWIHWVKQAPGQGLEWIGYIYPSTGFTEYNQKFKDRATLTADKSTSTAYMELSSLRSEDTAVYYCARWRDSSGYHAMDYWGQGTSVTVSS

SEQ ID NO: 36 - protein, 121 aa, Artificial Sequence
  Synthetic Sequence
QVQLVQSGHEVKQPGASVKMSCKASGYSFTSSWIHWVKQAPGQGLEWIGYIYPSTGFTEYNQKFKDRATLTADKSTSTAYMELSSLRSEDTAVYYCARWRDSSGYHAMDYWGQGTLVTVSS

SEQ ID NO: 37 - protein, 121 aa, Artificial Sequence
  Synthetic Sequence
QVQLVQSGHEVKQPGASVKMSCKASGYSFTSSWIHWVRQAPGQGLEWIGYIYPSTGFTEYNQKFKDRATLTADKSTSTAYMELSSLRSEDTAVYYCARWRDSSGYHAMDYWGQGTLVTVSS

SEQ ID NO: 38 - protein, 121 aa, Artificial Sequence
  Synthetic Sequence
QVQLVQSGHEVKQPGASVKVSCKASGYSFTSSWIHWVRQAPGQGLEWIGYIYPSTGFTEYNQKFKDRATITADKSTSTAYMELSSLRSEDTAVYYCARWRDSSGYHAMDYWGQGTLVTVSS

SEQ ID NO: 39 - protein, 111 aa, Artificial Sequence
  Synthetic Sequence
DIVLTQSPASLTLSPGQRLTISCRASQSVSTSGYSYMHWYQQKPDQSPKLLIKFGSNLESGIPARFSGSGSGTDFTLTISSLEEEDFATYYCQHSWEIPYTFGQGTKLEIK

SEQ ID NO: 40 - protein, 111 aa, Artificial Sequence
  Synthetic Sequence
DIVLTQSPATLSLSPGQRLTISCRASQSVSTSGYSYMHWYQQKPDQSPKLLIKFGSNLESGIPARFSGSGSGTDFTLTISSLEPEDFATYYCQHSWEIPYTFGQGTKLEIK

SEQ ID NO: 41 - protein, 111 aa, Artificial Sequence
  Synthetic Sequence
EIVLTQSPATLSLSPGQRLTISCRASQSVSTSGYSYMHWYQQKPDQSPKLLIKFGSNLESGIPARFSGSGSGTDFTLTISSLEPEDFATYYCQHSWEIPYTFGQGTKLEIK

SEQ ID NO: 42 - protein, 111 aa, Artificial Sequence
  Synthetic Sequence
DIVLTQSPATLSLSPGQRLTISCRASQSVSTSGYSYMHWYQQKPDQSPKLLIKFGSNLESGIPARFSGSGSGTDFTLTISSLEPEDFAVYYCQHSWEIPYTFGQGTKLEIK

SEQ ID NO: 43 - protein, 451 aa, Artificial Sequence
  Synthetic Sequence
EVQLVESGGGLVQPGGSLRLSCAASGFTFSRYWMSWVRQAPGKGLEWVANIKQDGSEKYYVDSVKGRFTISRDNAKNSLYLQMNSLRAEDTAVYYCAREGGWFGELAFDYWGQGTLVTVSSASTKGPSVFPLAPSSKSTSGGTAALGCLVKDYFPEPVTVSWNSGALTSGVHTFPAVLQSSGLYSLSSVVTVPSSSLGTQTYICNVNHKPSNTKVDKRVEPKSCDKTHTCPPCPAPEFEGGPSVFLFPPKPKDTLMISRTPEVTCVVVDVSHEDPEVKFNWYVDGVEVHNAKTKPREEQYNSTYRVVSVLTVLHQDWLNGKEYKCKVSNKALPASIEKTISKAKGQPREPQVYTLPPSREEMTKNQVSLTCLVKGFYPSDIAVEWESNGQPENNYKTTPPVLDSDGSFFLYSKLTVDKSRWQQGNVFSCSVMHEALHNHYTQKSLSLSPGK

SEQ ID NO: 44 - protein, 215 aa, Artificial Sequence
  Synthetic Sequence
EIVLTQSPGTLSLSPGERATLSCRASQRVSSSYLAWYQQKPGQAPRLLIYDASSRATGIPDRFSGSGSGTDFTLTISRLEPEDFAVYYCQQYGSLPWTFGQGTKVEIKRTVAAPSVFIFPPSDEQLKSGTASVVCLLNNFYPREAKVQWKVDNALQSGNSQESVTEQDSKDSTYSLSSTLTLSKADYEKHKVYACEVTHQGLSSPVTKSFNRGEC

SEQ ID NO: 45 - protein, 121 aa, Artificial Sequence
  Synthetic Sequence
EVQLVESGGGLVQPGGSLRLSCAASGFTFSRYWMSWVRQAPGKGLEWVANIKQDGSEKYYVDSVKGRFTISRDNAKNSLYLQMNSLRAEDTAVYYCAREGGWFGELAFDYWGQGTLVTVSS

SEQ ID NO: 46 - protein, 108 aa, Artificial Sequence
  Synthetic Sequence
EIVLTQSPGTLSLSPGERATLSCRASQRVSSSYLAWYQQKPGQAPRLLIYDASSRATGIPDRFSGSGSGTDFTLTISRLEPEDFAVYYCQQYGSLPWTFGQGTKVEIK

SEQ ID NO: 47 - protein, 448 aa, Artificial Sequence
  Synthetic Sequence
EVQLVESGGGLVQPGGSLRLSCAASGFTFSDSWIHWVRQAPGKGLEWVAWISPYGGSTYYADSVKGRFTISADTSKNTAYLQMNSLRAEDTAVYYCARRHWPGGFDYWGQGTLVTVSSASTKGPSVFPLAPSSKSTSGGTAALGCLVKDYFPEPVTVSWNSGALTSGVHTFPAVLQSSGLYSLSSVVTVPSSSLGTQTYICNVNHKPSNTKVDKKVEPKSCDKTHTCPPCPAPELLGGPSVFLFPPKPKDTLMISRTPEVTCVVVDVSHEDPEVKFNWYVDGVEVHNAKTKPREEQYASTYRVVSVLTVLHQDWLNGKEYKCKVSNKALPAPIEKTISKAKGQPREPQVYTLPPSREEMTKNQVSLTCLVKGFYPSDIAVEWESNGQPENNYKTTPPVLDSDGSFFLYSKLTVDKSRWQQGNVFSCSVMHEALHNHYTQKSLSLSPGK

SEQ ID NO: 48 - protein, 214 aa, Artificial Sequence
  Synthetic Sequence
DIQMTQSPSSLSASVGDRVTITCRASQDVSTAVAWYQQKPGKAPKLLIYSASFLYSGVPSRFSGSGSGTDFTLTISSLQPEDFATYYCQQYLYHPATFGQGTKVEIKRTVAAPSVFIFPPSDEQLKSGTASVVCLLNNFYPREAKVQWKVDNALQSGNSQESVTEQDSKDSTYSLSSTLTLSKADYEKHKVYACEVTHQGLSSPVTKSFNRGEC

SEQ ID NO: 49 - protein, 450 aa, Artificial Sequence
  Synthetic Sequence
EVQLLESGGGLVQPGGSLRLSCAASGFTFSSYIMMWVRQAPGKGLEWVSSIYPSGGITFYADTVKGRFTISRDNSKNTLYLQMNSLRAEDTAVYYCARIKLGTVTTVDYWGQGTLVTVSSASTKGPSVFPLAPSSKSTSGGTAALGCLVKDYFPEPVTVSWNSGALTSGVHTFPAVLQSSGLYSLSSVVTVPSSSLGTQTYICNVNHKPSNTKVDKKVEPKSCDKTHTCPPCPAPELLGGPSVFLFPPKPKDTLMISRTPEVTCVVVDVSHEDPEVKFNWYVDGVEVHNAKTKPREEQYNSTYRVVSVLTVLHQDWLNGKEYKCKVSNKALPAPIEKTISKAKGQPREPQVYTLPPSRDELTKNQVSLTCLVKGFYPSDIAVEWESNGQPENNYKTTPPVLDSDGSFFLYSKLTVDKSRWQQGNVFSCSVMHEALHNHYTQKSLSLSPGK

SEQ ID NO: 50 - protein, 216 aa, Artificial Sequence
  Synthetic Sequence
QSALTQPASVSGSPGQSITISCTGTSSDVGGYNYVSWYQQHPGKAPKLMIYDVSNRPSGVSNRFSGSKSGNTASLTISGLQAEDEADYYCSSYTSSSTRVFGTGTKVTVLGQPKANPTVTLFPPSSEELQANKATLVCLISDFYPGAVTVAWKADGSPVKAGVETTKPSKQSNNKYAASSYLSLTPEQWKSHRSYSCQVTHEGSTVEKTVAPTECS

SEQ ID NO: 51 - protein, 123 aa, Artificial Sequence
  Synthetic Sequence
QVQLVQSGAEVKKPGSSVKVSCKTSGDTFSTYAISWVRQAPGQGLEWMGGIIPIFGKAHYAQKFQGRVTITADESTSTAYMELSSLRSEDTAVYFCARKFHFVSGSPFGMDVWGQGTTVTVSS

SEQ ID NO: 52 - protein, 106 aa, Artificial Sequence
  Synthetic Sequence
EIVLTQSPATLSLSPGERATLSCRASQSVSSYLAWYQQKPGQAPRLLIYDASNRATGIPARFSGSGSGTDFTLTISSLEPEDFAVYYCQQRSNWPTFGQGTKVEIK

SEQ ID NO: 53 - protein, 117 aa, Artificial Sequence
  Synthetic Sequence
QVQLVQSGAEVKKPGASVKVSCKASGYTFTDYGFSWVRQAPGQGLEWMGWITAYNGNTNYAQKLQGRVTMTTDTSTSTVYMELRSLRSDDTAVYYCARDYFYGMDVWGQGTTVTVSS

SEQ ID NO: 54 - protein, 107 aa, Artificial Sequence
  Synthetic Sequence
EIVLTQSPATLSLSPGERATLSCRASQSVSSYLVWYQQKPGQAPRLLIYDASNRATGIPARFSGSGSGTDFTLTISSLEPEDFAVYYCQQRSNWPRTFGQGTKVEIK

SEQ ID NO: 55 - protein, 118 aa, Artificial Sequence
  Synthetic Sequence
QVQLVQSGAEVKKPGASVKVSCKASGYTFTSYDVHWVRQAPGQRLEWMGWLHADTGITKFSQKFQGRVTITRDTSASTAYMELSSLRSEDTAVYYCARERIQLWFDYWGQGTLVTVSS

SEQ ID NO: 56 - protein, 107 aa, Artificial Sequence
  Synthetic Sequence
DIQMTQSPSSLSASVGDRVTITCRASQGISSWLAWYQQKPEKAPKSLIYAASSLQSGVPSRFSGSGSGTDFTLTISSLQPEDFATYYCQQYNSYPYTFGQGTKLEIK

SEQ ID NO: 57 - protein, 120 aa, Artificial Sequence
  Synthetic Sequence
QVQLVQSGAEVKKPGSSVKVSCKVSGGIFSTYAINWVRQAPGQGLEWMGGIIPIFGTANHAQKFQGRVTITADESTSTAYMELSSLRSEDTAVYYCARDQGIAAALFDYWGQGTLVTVSS

SEQ ID NO: 58 - protein, 108 aa, Artificial Sequence
  Synthetic Sequence
EIVLTQSPGTLSLSPGERATLSCRASQSVSSSYLAWYQQKPGQAPRLLIYGASSRATGIPDRFSGSGSGTDFTLTISRLEPEDFAVYYCQQYGSSPWTFGQGTKVEIK

SEQ ID NO: 59 - protein, 113 aa, Artificial Sequence
  Synthetic Sequence
EVQLVESGGGLVQPGRSLRLSCAVSGFTFDDYVVHWVRQAPGKGLEWVSGISGNSGNIGYADSVKGRFTISRDNAKNSLYLQMNSLRAEDTALYYCAVPFDYWGQGTLVTVSS

SEQ ID NO: 60 - protein, 107 aa, Artificial Sequence; identical to SEQ ID NO: 56
  Synthetic Sequence

SEQ ID NO: 61 - protein, 123 aa, Artificial Sequence
  Synthetic Sequence
QVQLVQSGAEVKKPGSSVKVSCKTSGDTFSSYAISWVRQAPGQGLEWMGGIIPIFGRAHYAQKFQGRVTITADESTSTAYMELSSLRSEDTAVYFCARKFHFVSGSPFGMDVWGQGTTVTVSS

SEQ ID NO: 62 - protein, 106 aa, Artificial Sequence; identical to SEQ ID NO: 52
  Synthetic Sequence

SEQ ID NO: 63 - protein, 123 aa, Artificial Sequence
  Synthetic Sequence
QVQLVQSGAEVKKPGSSVKVSCKTSGGTFSSYAISWVRQAPGQGLEWMGGIIPIFGKAHYAQKFQGRVTITADESTTTAYMELSSLRSEDTAVYYCARKYDYVSGSPFGMDVWGQGTTVTVSS

SEQ ID NO: 64 - protein, 106 aa, Artificial Sequence; identical to SEQ ID NO: 52
  Synthetic Sequence

SEQ ID NO: 65 - protein, 121 aa, Artificial Sequence
  Synthetic Sequence
QVQLVQSGAEVKKPGSSVKVSCKASGGTFSSYAINWVRQAPGQGLEWMGGIIPIFGSANYAQKFQDRVTITADESTSAAYMELSSLRSEDTAVYYCARDSSGWSRYYMDVWGQGTTVTVSS

SEQ ID NO: 66 - protein, 106 aa, Artificial Sequence
  Synthetic Sequence
EIVLTQSPGTLSLSPGERATLSCRASQSVSSSYLAWYQQKPGQAPRLLIYGASSRATGIPDRFSGSGSGTDFTLTISRLEPEDFAVYYCQQYGSSPFGGGTKVEIK

SEQ ID NO: 67 - protein, 123 aa, Artificial Sequence
  Synthetic Sequence
QVQLVQSGAEVKEPGSSVKVSCKASGGTFNSYAISWVRQAPGQGLEWMGGIIPLFGIAHYAQKFQGRVTITADESTNTAYMDLSSLRSEDTAVYYCARKYSYVSGSPFGMDVWGQGTTVTVSS

SEQ ID NO: 68 - protein, 106 aa, Artificial Sequence
  Synthetic Sequence
EIVLTQSPATLSLSPGERATLSCRASQSVSSYLAWYQQKPGQAPRLLIYDASNRATGIPARFSGSGSGTDFTLTISSLEPEDFAVYYCQQRSNWPTFGQGTRLEIK

SEQ ID NO: 69 - protein, 121 aa, Artificial Sequence
  Synthetic Sequence
EVQLVESGGGLVQPGRSLRLSCAASGITFDDYGMHWVRQAPGKGLEWVSGISWNRGRIEYADSVKGRFTISRDNAKNSLYLQMNSLRAEDTALYYCAKGRFRYFDWFLDYWGQGTLVTVSS

SEQ ID NO: 70 - protein, 107 aa, Artificial Sequence
  Synthetic Sequence
AIQLTQSPSSLSASVGDRVTITCRASQGISSALAWYQQKPGKAPKLLIYDASSLESGVPSRFSGSGSGTDFTLTISSLQPEDFATYYCQQFNSYPFTFGPGTKVDIK

SEQ ID NO: 71 - protein, 118 aa, Artificial Sequence
  Synthetic Sequence
EVKLQESGPSLVKPSQTLSLTCSVTGYSITSDYWNWIRKFPGNKLEYVGYISYTGSTYYNPSLKSRISITRDTSKNQYYLQLNSVTSEDTATYYCARYGGWLSPFDYWGQGTTLTVSS

SEQ ID NO: 72 - protein, 107 aa, Artificial Sequence
  Synthetic Sequence
DIVMTQSHKLMSTSVGDRVSITCKASQDVGTAVAWYQQKPGQSPKLLIYWASTRHTGVPDRFTGSGSGTDFTLTISNVQSEDLADYFCQQDSSYPLTFGAGTKVELK

SEQ ID NO: 73 - protein, 120 aa, Artificial Sequence
  Synthetic Sequence
EVQLQESGPGLVAPSQSLSITCTVSGFSLTTYSINWIRQPPGKGLEWLGVMWAGGGTNSNSVLKSRLIISKDNSKSQVFLKMNSLQTDDTARYYCARYYGNSPYYAIDYWGQGTSVTVSS

SEQ ID NO: 74 - protein, 107 aa, Artificial Sequence
  Synthetic Sequence
DIVTTQSHKLMSTSVGDRVSITCKASQDVGTAVAWYQQKPGQSPKLLIYWASTRHTGVPDRFTGSGSGTDFTLTISNVQSEDLADYFCQQDSSYPLTFGAGTKVELK

SEQ ID NO: 75 - protein, 118 aa, Artificial Sequence
  Synthetic Sequence
EVKLQESGPSLVKPSQTLSLTCSVTGYSIISDYWNWIRKFPGNKLEYLGYISYTGSTYYNPSLKSRISITRDTSKNQYYLQLNSVTTEDTATYYCARRGGWLLPFDYWGQGTTLTVSS

SEQ ID NO: 76 - protein, 113 aa, Artificial Sequence
  Synthetic Sequence
DIVMTQSPSSLAVSVGEKVSMGCKSSQSLLYSSNQKNSLAWYQQKPGQSPKLLIDWASTRESGVPDRFTGSGSGTDFTLTISSVKAEDLAVYYCQQYYGYPLTFGAGTKLELK

SEQ ID NO: 77 - protein, 118 aa, Artificial Sequence
  Synthetic Sequence
EVKLQESGPSLVKPGASVKLSCKASGYTFTSYDINWVKQRPGQGLEWIGWIFPRDNNTKYNENFKGKATLTVDTSSTTAYMELHSLTSEDSAVYFCTKENWVGDFDYWGQGTTLTLSS

SEQ ID NO: 78 - protein, 106 aa, Artificial Sequence
  Synthetic Sequence
DIVMTQSPAIMSASPGEKVTMTCSASSSIRYMHWYQQKPGTSPKRWISDTSKLTSGVPARFSGSGSGTSYALTISSMEAEDAATYYCHQRSSYPWTFGGGTKLEIK

SEQ ID NO: 79 - protein, 114 aa, Artificial Sequence
  Synthetic Sequence
EVQLQQSGPDLVTPGASVRISCQASGYTFPDYYMNWVKQSHGKSLEWIGDIDPNYGGTTYNQKFKGKAILTVDRSSSTAYMELRSLTSEDSAVYYCARGALTDWGQGTSLTVSS

SEQ ID NO: 80 - protein, 106 aa, Artificial Sequence
  Synthetic Sequence
QIVLSQSPAILSASPGEKVTMTCRASSSVSYIYWFQQKPGSSPKPWIYATFNLASGVPARFSGSGSGTSYSLTISRVETEDAATYYCQQWSNNPLTFGAGTKLELK

SEQ ID NO: 81 - protein, 115 aa, Artificial Sequence
  Synthetic Sequence
EVQLVQSGPELKKPGASVKMSCKASGYTFTSYVMHWVKQAPGQRLEWIGYVNPFNDGTKYNEMFKGRATLTSDKSTSTAYMELSSLRSEDSAVYYCARQAWGYPWGQGTLVTVSS

SEQ ID NO: 82 - protein, 115 aa, Artificial Sequence
  Synthetic Sequence
EVQLVQSGAEVKKPGASVKMSCKASGYTFTSYVMHWVKQAPGQRLEWIGYVNPFNDGTKYNEMFKGRATLTSDKSTSTAYMELSSLRSEDTAVYYCARQAWGYPWGQGTLVTVSS

SEQ ID NO: 83 - protein, 115 aa, Artificial Sequence
  Synthetic Sequence
EVQLVQSGAEVKKPGASVKMSCKASGYTFTSYVMHWVRQAPGQRLEWIGYVNPFNDGTKYNEMFKGRATLTSDKSTSTAYMELSSLRSEDTAVYYCARQAWGYPWGQGTLVTVSS

SEQ ID NO: 84 - protein, 115 aa, Artificial Sequence
  Synthetic Sequence
EVQLVQSGAEVKKPGASVKVSCKASGYTFTSYVMHWVRQAPGQRLEWIGYVNPFNDGTKYNEMFKGRATLTSDKSTSTAYMELSSLRSEDTAVYYCARQAWGYPWGQGTLVTVSS

SEQ ID NO: 85 - protein, 115 aa, Artificial Sequence
  Synthetic Sequence
EVQLVQSGAEVKKPGASVKVSCKASGYTFTSYVMHWVRQAPGQRLEWIGYVNPFNDGTKYNEMFKGRATITSDKSTSTAYMELSSLRSEDTAVYYCARQAWGYPWGQGTLVTVSS

SEQ ID NO: 86 - protein, 111 aa, Artificial Sequence
  Synthetic Sequence
DIVLTQSPASLALSPGERATLSCRATESVEYYGTSLVQWYQQKPGQPPKLLIYAASSVDSGVPSRFSGSGSGTDFTLTINSLEEEDAAMYFCQQSRRVPYTFGQGTKLEIK

SEQ ID NO: 87 - protein, 111 aa, Artificial Sequence
  Synthetic Sequence
DIVLTQSPATLSLSPGERATLSCRATESVEYYGTSLVQWYQQKPGQPPKLLIYAASSVDSGVPSRFSGSGSGTDFTLTINSLEAEDAAMYFCQQSRRVPYTFGQGTKLEIK

SEQ ID NO: 88 - protein, 111 aa, Artificial Sequence
  Synthetic Sequence
EIVLTQSPATLSLSPGERATLSCRATESVEYYGTSLVQWYQQKPGQPPKLLIYAASSVDSGVPSRFSGSGSGTDFTLTINSLEAEDAAMYFCQQSRRVPYTFGQGTKLEIK

SEQ ID NO: 89 - protein, 111 aa, Artificial Sequence
  Synthetic Sequence
DIVLTQSPATLSLSPGERATLSCRATESVEYYGTSLVQWYQQKPGQPPKLLIYAASSVDSGVPSRFSGSGSGTDFTLTINSLEAEDAATYFCQQSRRVPYTFGQGTKLEIK

SEQ ID NO: 90 - protein, 120 aa, Artificial Sequence
  Synthetic Sequence
EVQLVESGGGLVKPGGSLRLSCAASGFTFSTYSMNWVRQAPGKGLEWVSSISSSGDYIYYADSVKGRFTISRDNAKNSLFLQMNSLKAEDTAVYYCARDLVTSMVAFDYWGQGTLVTVSS

SEQ ID NO: 91 - protein, 108 aa, Artificial Sequence
  Synthetic Sequence
SYELTQPPSVSVSPGQAARITCSGDALPQKYVFWYQQKSGQAPVLVIYEDSKRPSGIPERFSGSSSGTMATLTISGAQVEDEADYYCYSTDRSGNHRVFGGGTRLTVL

SEQ ID NO: 92 - protein, 120 aa, Artificial Sequence
  Synthetic Sequence
EVQLVESGGGLVQPGGSLRLSCAASGFTFSSYWMSWVRQAPGKGLEWVANIKQDGGEQYYVDSVKGRFTISRDNAKNSLYLQMNSLRAEDTAVYYCARDWNYGYYDMDVWGQGTTVTVSS

SEQ ID NO: 93 - protein, 108 aa, Artificial Sequence
  Synthetic Sequence
EIVLTQSPGTLSLSPGERATLSCRASQSVSSNYLAWFQQKPGQAPRLLIFGTSSRATGIPDRFSGSGSGTDFTLTISRLEPEDFAVYYCQQYGSSIFTFGPGTKVDIK

SEQ ID NO: 94 - protein, 121 aa, Artificial Sequence; identical to SEQ ID NO: 45
  Synthetic Sequence

SEQ ID NO: 95 - protein, 108 aa, Artificial Sequence
  Synthetic Sequence
EIVLTQSPGTLSLSPGERATLSCRASQRVSSSYLAWYQQKPGQAPRLLIYDASSRATGIPDRFSGSGSGTDFTLTISRLEPEDFAVYYCQQYGSLPWTFGQGTEVEIK

SEQ ID NO: 96 - protein, 121 aa, Artificial Sequence
  Synthetic Sequence
EVQLLESGGGLVQPGGSLRLSCAASGFTFSNYAMSWVRQAPGKGLEWVSAIRGSGGSTYYADSVKGRFTISRDNSKNTLYLQMNSLRAEDTAVYYCAKDLHYDSSGYLDYWGQGTLVTVSS

SEQ ID NO: 97 - protein, 107 aa, Artificial Sequence
  Synthetic Sequence
DIQMTQSPSSVSASVGDRVTITCRASQGIRSWLAWYQQKPGKAPKLLIYAISRLQSGVPSRFSGSGSGTDFTLTISSLQPEDFATYYCQQANSFPLTFGGGTKVEIK

SEQ ID NO: 98 - protein, 119 aa, Artificial Sequence
  Synthetic Sequence
EVQLVESGGGLVQPGGSLRLSCAASGFTFSSYWMSWVRQAPGKGLEWVANIKQDGGEKYYVDSVKGRFTISRDNAKNSLFLQMNSLRAEDTAVYYCARVQLYSDYFDYWGQGTLVTVSS

SEQ ID NO: 99 - protein, 107 aa, Artificial Sequence
  Synthetic Sequence
DIQMTQSPSSVSASVGDRVTITCRASQGISSWLAWYQQKSGKAPKLLIYAASGLQSGVPSRFSGSGSGTDFTLTISSLQPEDLATYYCQQSHSLPPTFGQGTKVEIK

SEQ ID NO: 100 - protein, 121 aa, Artificial Sequence
  Synthetic Sequence
EVQLLESGGDLVQPGGSLRLSCAASGFTFNSYAMSWVRQAPGKGLEWVSTISGSGGFTFSADSVKGRFTISRDNSKNTLFLQMNSLRVEDSAVYSCAKVLVGFNNGCWDYWGQGTLVTVSS

SEQ ID NO: 101 - protein, 108 aa, Artificial Sequence
  Synthetic Sequence
SYVLTQPPSVSVAPGQTARITCGGNNIGSKSVHWYQQKPGQAPVLVVYDDSDRPSGIPERFSGSNSGNTATLTISRVEAGDEADYYCQVWDSSNDHVVFGGGTKLTVL

SEQ ID NO: 102 - protein, 120 aa, Artificial Sequence
  Synthetic Sequence
EVQLVESGGGLVKPGGSLRLSCAASGFTFSTYSMNWVRQAPGKGLEWVSSISSSGDYIYYADSVKGRFTISRDNAKNSLYLQMNSLRAEDTAVYYCARDLVTSMVAFDYWGQGTLVTVSS

SEQ ID NO: 103 - protein, 108 aa, Artificial Sequence
  Synthetic Sequence
SYELTQPPSVSVSPGQTARITCSGDALPQKYVFWYQQKSGQAPVLVIYEDSKRPSGIPERFSGSSSGTMATLTISGAQVEDEADYYCYSTDRSGNHRVFGGGTKLTVL

SEQ ID NO: 104 - protein, 121 aa, Artificial Sequence; identical to SEQ ID NO: 45
  Synthetic Sequence

SEQ ID NO: 105 - protein, 108 aa, Artificial Sequence; identical to SEQ ID NO: 46
  Synthetic Sequence

SEQ ID NO: 106 - protein, 120 aa, Artificial Sequence
  Synthetic Sequence
QVQLVQSGAEVKKPGASVKVSCKASGYTFTSYWMYWVRQATGQGLEWMGRIDPNSGSTKYNEKFKNRFTISRDDSKNTAYLQMNSLKTEDTAVYYCARDYRKGLYAMDYWGQGTTVTVSS

SEQ ID NO: 107 - protein, 120 aa, Artificial Sequence
  Synthetic Sequence
EVQLVQSGAEVKKPGATVKISCKVSGYTFTSYWMYWVRQATGQGLEWMGRIDPNSGSTKYNEKFKNRVTITADKSTSTAYMELSSLRSEDTAVYYCARDYRKGLYAMDYWGQGTTVTVSS

SEQ ID NO: 108 - protein, 120 aa, Artificial Sequence
  Synthetic Sequence
EVQLVQSGAEVKKPGESLRISCKGSGYTFTSYWMYWVRQAPGQGLEWMGRIDPNSGSTKYNEKFKNRVTISVDTSKNQFSLKLSSVTAADTAVYYCARDYRKGLYAMDYWGQGTTVTVSS

SEQ ID NO: 109 - protein, 120 aa, Artificial Sequence
  Synthetic Sequence
EVQLVQSGAEVKKPGATVKISCKVSGYTFTSYWMYWIRQSPSRGLEWLGRIDPNSGSTKYNEKFKNRLTISKDTSKNQVVLTMTNMDPVDTATYYCARDYRKGLYAMDYWGQGTTVTVSS

SEQ ID NO: 110 - protein, 120 aa, Artificial Sequence
  Synthetic Sequence
EVQLVQSGAEVKKPGESLRISCKGSGYTFTSYWMYWIRQPPGKGLEWIGRIDPNSGSTKYNEKFKNRVTITADKSTSTAYMELSSLRSEDTAVYYCARDYRKGLYAMDYWGQGTTVTVSS

SEQ ID NO: 111 - protein, 120 aa, Artificial Sequence
  Synthetic Sequence
QVQLVQSGAEVKKPGASVKVSCKASGYTFTSYWMYWIRQSPSRGLEWLGRIDPNSGSTKYNEKFKNRFTISRDDSKNTAYLQMNSLKTEDTAVYYCARDYRKGLYAMDYWGQGTTVTVSS

SEQ ID NO: 112 - protein, 120 aa, Artificial Sequence
  Synthetic Sequence
EVQLVQSGAEVKKPGESLRISCKGSGYTFTSYWMYWVRQARGQRLEWIGRIDPNSGSTKYNEKFKNRLTISKDTSKNQVVLTMTNMDPVDTATYYCARDYRKGLYAMDYWGQGTTVTVSS

SEQ ID NO: 113 - protein, 120 aa, Artificial Sequence
  Synthetic Sequence
QITLKESGPTLVKPTQTLTLTCTFSGYTFTSYWMYWVRQAPGKGLEWVSRIDPNSGSTKYNEKFKNRVTITADKSTSTAYMELSSLRSEDTAVYYCARDYRKGLYAMDYWGQGTTVTVSS

SEQ ID NO: 114 - protein, 120 aa, Artificial Sequence
  Synthetic Sequence
EVQLVQSGAEVKKPGATVKISCKVSGYTFTSYWMYWVRQARGQRLEWIGRIDPNSGSTKYNEKFKNRFTISRDNSKNTLYLQMNSLRAEDTAVYYCARDYRKGLYAMDYWGQGTTVTVSS

SEQ ID NO: 115 - protein, 107 aa, Artificial Sequence
  Synthetic Sequence
DIVMTQTPLSLPVTPGEPASISCKASQDVGTAVAWYLQKPGQSPQLLIYWASTRHTGIPARFSGSGSGTEFTLTISSLQSEDFAVYYCQQYNSYPLTFGQGTKVEIK

SEQ ID NO: 116 - protein, 107 aa, Artificial Sequence
  Synthetic Sequence
DIQMTQSPSSLSASVGDRVTITCKASQDVGTAVAWYLQKPGQSPQLLIYWASTRHTGVPSRFSGSGSGTDFTLTISSLQPEDFATYYCQQYNSYPLTFGQGTKVEIK

SEQ ID NO: 117 - protein, 107 aa, Artificial Sequence
  Synthetic Sequence
EIVLTQSPDFQSVTPKEKVTITCKASQDVGTAVAWYLQKPGQSPQLLIYWASTRHTGVPDRFSGSGSGTDFTLKISRVEAEDVGVYYCQQYNSYPLTFGQGTKVEIK

SEQ ID NO: 118 - protein, 107 aa, Artificial Sequence
  Synthetic Sequence
EIVLTQSPDFQSVTPKEKVTITCKASQDVGTAVAWYLQKPGQSPQLLIYWASTRHTGVPSRFSGSGSGTDFTFTISSLQPEDIATYYCQQYNSYPLTFGQGTKVEIK

SEQ ID NO: 119 - protein, 107 aa, Artificial Sequence
  Synthetic Sequence
EIVLTQSPATLSLSPGERATLSCKASQDVGTAVAWYLQKPGQSPQLLIYWASTRHTGIPPRFSGSGYGTDFTLTINNIESEDAAYYFCQQYNSYPLTFGQGTKVEIK

SEQ ID NO: 120 - protein, 107 aa, Artificial Sequence
  Synthetic Sequence
DVVMTQSPLSLPVTLGQPASISCKASQDVGTAVAWYQQKPGQAPRLLIYWASTRHTGVPSRFSGSGSGTEFTLTISSLQPDDFATYYCQQYNSYPLTFGQGTKVEIK

SEQ ID NO: 121 - protein, 107 aa, Artificial Sequence
  Synthetic Sequence
DIQMTQSPSSLSASVGDRVTITCKASQDVGTAVAWYQQKPGQAPRLLIYWASTRHTGVPSRFSGSGSGTDFTFTISSLQPEDIATYYCQQYNSYPLTFGQGTKVEIK

SEQ ID NO: 122 - protein, 107 aa, Artificial Sequence
  Synthetic Sequence
AIQLTQSPSSLSASVGDRVTITCKASQDVGTAVAWYLQKPGQSPQLLIYWASTRHTGVPSRFSGSGSGTDFTFTISSLEAEDAATYYCQQYNSYPLTFGQGTKVEIK

SEQ ID NO: 123 - protein, 107 aa, Artificial Sequence
  Synthetic Sequence
EIVLTQSPDFQSVTPKEKVTITCKASQDVGTAVAWYQQKPGQAPRLLIYWASTRHTGVPSRFSGSGSGTEFTLTISSLQPDDFATYYCQQYNSYPLTFGQGTKVEIK

SEQ ID NO: 124 - protein, 116 aa, Artificial Sequence
  Synthetic Sequence
EVKLVESGGGLVKPGGSLKLSCAASGFIFRSYGMSWVRQTPEKRLEWVASISSGGSTYYPDSVKGRFTISRDNARNILYLQMSSLRSEDTAMYDCARGYDSGFAYWGQGTLVTVSE

SEQ ID NO: 125 - protein, 116 aa, Artificial Sequence
  Synthetic Sequence
EVKLVESGGGLVKPGGSLKLSCAASGFTFRSYGMSWVRQTPEKRLEWVASISSGGTTYYPDSVKGRFIISRDNARNILYLQMSSLRSEDTAMYYCAKGYDSGFAYWGQGTLVIVSA

SEQ ID NO: 126 - protein, 116 aa, Artificial Sequence
  Synthetic Sequence
QVQLKQSGPGLVQPSQSLSITCTVSGFSLTTYGVHWVRQSPGKGLEWLGVIWRGVTTDYNAAFMSRLTITKDNSKSQVFFKMNSLQANDTAIYYCARLGFYAMDYWGQGTSVTVSS

SEQ ID NO: 127 - protein, 116 aa, Artificial Sequence
  Synthetic Sequence
QVQLKQSGPGLVQPSQSLSITCTVSGFSLTSYGVHWVRQSPGKGLEWLGVIWSGGVTDYNAAFISRLSISKDNSKSQVFFKMNSLQANDTAIYYCARLGFYAMDYWGQGTSVTVSS

SEQ ID NO: 128 - protein, 119 aa, Artificial Sequence
  Synthetic Sequence
EVKLFESGGGLVQPGGSLKLSCVASGFDFSTYWMHWVRQAPGQGLEWIGQINPDSTTINYAPSLKDRFIISRDNAKNTLFLQMSKVRSEDTALYYCAKPGDYGYDFDCWGQGTTLTVSS

SEQ ID NO: 129 - protein, 119 aa, Artificial Sequence
  Synthetic Sequence
EVQLQESGPSLVKPSQTLSLTCSVTGDSITSGYWNWIRKFPGNKLEYMGYISYSGSTYYNPSLKSRISITRDTSKNQYYLQLNSVTTEDTATYYCARSLLWFSTGFAYWGQGTLVTVSA

SEQ ID NO: 130 - protein, 116 aa, Artificial Sequence
  Synthetic Sequence
QVQLKQSGPGLVQPSQSLSITCTVSGFSLTSYGVHWVRQSPGKGLEWLGVIWSGGITDYNAAFKSRLSISKDNSKSQVFFKMNSLQANDTAIYFCARLGFYAMDYWGQGTSVTVSS

SEQ ID NO: 131 - protein, 116 aa, Artificial Sequence
  Synthetic Sequence
EVKLVESGGGLVKPGGSLKLSCAASGFTFRSYGMSWARQIPEKRLEWVASISSGGTTYYLGSVQGRFTISRDNARNILYLQMSSLRSEDTAMYYCARGYDAGFAYWGQGTLVSVSE

SEQ ID NO: 132 - protein, 117 aa, Artificial Sequence
  Synthetic Sequence
EVQLQESGPSLVKPSQTLSLTCSVTGDSITSGYWTWIRKFPGNKLEYMGYISYTGSTYYNPSLKSRISISRDTSKSQYYLQLNSVTTEDTATYYCARQRDWLGFAYWGQGTLVTVSA

SEQ ID NO: 133 - protein, 116 aa, Artificial Sequence
  Synthetic Sequence
EEKLVESGGGLVKPGGSLKLSCAASGFSFSSYGMSWVRQTPEKRLEWVASISSGGSIYYPDSVKGRFTISRDNARNILYLQMSSLRSEDTAMYYCARGYDAGFAFWGQGTLVTASA

SEQ ID NO: 134 - protein, 116 aa, Artificial Sequence
  Synthetic Sequence
QITLKESGPTLVKPTQTLTLTCTVSGFSLSTYGVHWIRQPPGKALEWLGVIWRGVTTDYNAAFMSRLTITKDNSKNQVVLTMNNMDPVDTATYYCARLGFYAMDYWGQGTLVTVSS

SEQ ID NO: 135 - protein, 116 aa, Artificial Sequence
  Synthetic Sequence
EVQLVESGGGLVKPGGSLRLSCAASGFIFRSYGMSWVRQAPGKGLEWVASISSGGSTYYPDSVKGRFTISRDNAKNSLYLQMNSLRAEDTAVYDCARGYDSGFAYWGQGTLVTVSS

SEQ ID NO: 136 - protein, 112 aa, Artificial Sequence
  Synthetic Sequence
DIVLTQSPASLAVSLGQRATISCRASQSVSTSSSSFMHWYQQKPGQPPKLLIKYASNLESGVPARFSGSGSGTDFTLNIHPVEEEDTATYYCQHSWEIPYTFGGGTKLEIKR

SEQ ID NO: 137 - protein, 111 aa, Artificial Sequence
  Synthetic Sequence
DIVLTQSPPSLAVSLGQRATISCRASQSVSTSSSSYMHWYQQKPGQPPKLLIKYASNLESGVPARFSGSGSGTDFTLNIHPVEEEDTATYYCQHSWEIPYTFGGGTKLEIK

SEQ ID NO: 138 - protein, 107 aa, Artificial Sequence
  Synthetic Sequence
SIVMTQTPKFLLVSAGDRVTITCKASQSVSNDVAWYQQKPGQSPKLLIYYAANRYTGVPDRFTGSGYGTDFTFTISIVQAEDLAVYFCQQDYTSPYTFGGGTKLEIK

SEQ ID NO: 139 - protein, 107 aa, Artificial Sequence
  Synthetic Sequence
SIVMTQTPKFLLVSAGDRVTITCKASQSVSNDVGWYQQKPGQSPKLLIYYASNRYSGVPDRFTGSGYGTDFTFTISTVQAEDLAVYFCQQDYTSPYTFGGGTKLEIK

SEQ ID NO: 140 - protein, 112 aa, Artificial Sequence
  Synthetic Sequence
DVLMTQTPLYLPVSLGDQASISCRSSQIIVHSNANTYLEWFLQKPGQSPKLLIYKVSNRFSGVPDRFSGSGSGTDFTLKISRVEAEDLGVYYCFQGSHVPYTFGGGTKLEIK

SEQ ID NO: 141 - protein, 108 aa, Artificial Sequence
  Synthetic Sequence
QIVLTQSPAIMSASPGEKVTLTCSASSSVSSSYLYWNQQKPGSSPKVWIYNTSNLASGVPARFSGSGSGTSYSLTISSMEAEDAASYFCHQWRSYPPTLGAGTKLELK

SEQ ID NO: 142 - protein, 106 aa, Artificial Sequence
  Synthetic Sequence
QIVLTQSPAIMSASPGEKVTMTCSANSSVSYMHWYQQKSGTSPKRWIYDTSKLASGVPARFSGSGSGTSYSLTISSMGAEDAATYYCQQWSSNPWTFGGGTKLEIK

SEQ ID NO: 143 - protein, 111 aa, Artificial Sequence
  Synthetic Sequence
DIVLTQSPASLAVSLGQRATISCRASQSVSTSSYSYMHWYQQKPGQPPKLLIKYASNLESGVPARFSGSGSGTDFTLNIHPVEEEDTATYYCQNSWEIPYTFGGGTKLEIK

SEQ ID NO: 144 - protein, 113 aa, Artificial Sequence
  Synthetic Sequence
DIVMTQTPSSLAVSLGEKVTMSCKSSQSLLYSSNQKNSLAWYQQKPGQSPKLLIYWASNRESGVPDRFTGSSSGTDFTLTISSVKAEDLAVYYCQQYYSYPLTFGAGTKLELK

SEQ ID NO: 145 - protein, 111 aa, Artificial Sequence
  Synthetic Sequence
DIVLTQSPASLAVSLGQRATISCRASQSVSTSSYSYVHWYQQKPGQPPKLLIKYASNLESGVPARFSGSGSGTDFTLNIHPVEEEDTATYYCQHSWEIPYTFGGGTKLEIK

SEQ ID NO: 146 - protein, 107 aa, Artificial Sequence
  Synthetic Sequence
DIQMTQSPSSLSASVGDRVTITCKASQSVSNDVAWYQQKPGKAPKLLIYYAANRYTGVPDRFSGSGYGTDFTFTISSLQPEDIATYFCQQDYTSPYTFGQGTKLEIK

SEQ ID NO: 147 - protein, 111 aa, Artificial Sequence
  Synthetic Sequence
DIVLTQSPASLAVSPGQRATITCRASQSVSTSSSSFMHWYQQKPGQPPKLLIKYASNLESGVPARFSGSGSGTDFTLTINPVEANDTANYYCQHSWEIPYTFGQGTKLEIK

SEQ ID NO: 148 - protein, 117 aa, Artificial Sequence
  Synthetic Sequence
EVQLVQSGAEVKKPGESLRISCKGSGYTFTTYWMHWVRQATGQGLEWMGNIYPGTGGSNFDEKFKNRVTITADKSTSTAYMELSSLRSEDTAVYYCTRWTTGTGAYWGQGTTVTVSS

SEQ ID NO: 149 - protein, 117 aa, Artificial Sequence
  Synthetic Sequence
EVQLVQSGAEVKKPGESLRISCKGSGYTFTTYWMHWIRQSPSRGLEWLGNIYPGTGGSNFDEKFKNRFTISRDNSKNTLYLQMNSLRAEDTAVYYCTRWTTGTGAYWGQGTTVTVSS

SEQ ID NO: 150 - protein, 117 aa, Artificial Sequence
  Synthetic Sequence
QVQLVQSGAEVKKPGASVKVSCKASGYTFTTYWMHWIRQSPSRGLEWLGNIYPGTGGSNFDEKFKNRFTISRDNSKNTLYLQMNSLRAEDTAVYYCTRWTTGTGAYWGQGTTVTVSS

SEQ ID NO: 151 - protein, 117 aa, Artificial Sequence
  Synthetic Sequence
EVQLVQSGAEVKKPGESLRISCKGSGYTFTTYWMHWVRQAPGQGLEWMGNIYPGTGGSNFDEKFKNRFTISRDNSKNTLYLQMNSLRAEDTAVYYCTRWTTGTGAYWGQGTTVTVSS

SEQ ID NO: 152 - protein, 113 aa, Artificial Sequence
  Synthetic Sequence
EIVLTQSPATLSLSPGERATLSCKSSQSLLDSGNQKNFLTWYQQKPGQAPRLLIYWASTRESGVPSRFSGSGSGTEFTLTISSLQPDDFATYYCQNDYSYPYTFGQGTKVEIK

SEQ ID NO: 153 - protein, 113 aa, Artificial Sequence
  Synthetic Sequence
DIQMTQSPSSLSASVGDRVTITCKSSQSLLDSGNQKNFLTWYQQKPGQAPRLLIYWASTRESGIPPRFSGSGYGTDFTLTINNIESEDAAYYFCQNDYSYPYTFGQGTKVEIK

SEQ ID NO: 154 - protein, 113 aa, Artificial Sequence
  Synthetic Sequence
EIVLTQSPATLSLSPGERATLSCKSSQSLLDSGNQKNFLTWYQQKPGKAPKLLIYWASTRESGVPSRFSGSGSGTDFTFTISSLQPEDIATYYCQNDYSYPYTFGQGTKVEIK

SEQ ID NO: 155 - protein, 113 aa, Artificial Sequence
  Synthetic Sequence
DIVMTQTPLSLPVTPGEPASISCKSSQSLLDSGNQKNFLTWYQQKPGQAPRLLIYWASTRESGVPSRFSGSGSGTDFTFTISSLEAEDAATYYCQNDYSYPYTFGQGTKVEIK

SEQ ID NO: 156 - protein, 113 aa, Artificial Sequence
  Synthetic Sequence
EIVLTQSPATLSLSPGERATLSCKSSQSLLDSGNQKNFLTWYQQKPGKAPKLLIYWASTRESGVPSRFSGSGSGTDFTFTISSLEAEDAATYYCQNDYSYPYTFGQGTKVEIK

SEQ ID NO: 157 - protein, 113 aa, Artificial Sequence
  Synthetic Sequence
EIVLTQSPDFQSVTPKEKVTITCKSSQSLLDSGNQKNFLTWYQQKPGQAPRLLIYWASTRESGVPSRFSGSGSGTDFTFTISSLEAEDAATYYCQNDYSYPYTFGQGTKVEIK

SEQ ID NO: 158 - protein, 113 aa, Artificial Sequence
  Synthetic Sequence
EIVLTQSPATLSLSPGERATLSCKSSQSLLDSGNQKNFLTWYQQKPGQAPRLLIYWASTRESGVPSRFSGSGSGTDFTFTISSLEAEDAATYYCQNDYSYPYTFGQGTKVEIK

SEQ ID NO: 159 - protein, 113 aa, Artificial Sequence
  Synthetic Sequence
DIQMTQSPSSLSASVGDRVTITCKSSQSLLDSGNQKNFLTWYLQKPGQSPQLLIYWASTRESGVPSRFSGSGSGTDFTFTISSLEAEDAATYYCQNDYSYPYTFGQGTKVEIK

SEQ ID NO: 160 - protein, 113 aa, Artificial Sequence
  Synthetic Sequence
DVVMTQSPLSLPVTLGQPASISCKSSQSLLDSGNQKNFLTWYQQKPGKAPKLLIYWASTRESGVPSRFSGSGSGTDFTFTISSLEAEDAATYYCQNDYSYPYTFGQGTKVEIK

SEQ ID NO: 161 - protein, 118 aa, Artificial Sequence
  Synthetic Sequence
EVQLVESGGGLVQPGGSLRLSCAASGFTFSDSWIHWVRQAPGKGLEWVAWISPYGGSTYYADSVKGRFTISADTSKNTAYLQMNSLRAEDTAVYYCARRHWPGGFDYWGQGTLVTVSA

SEQ ID NO: 162 - protein, 108 aa, Artificial Sequence
  Synthetic Sequence
DIQMTQSPSSLSASVGDRVTITCRASQDVSTAVAWYQQKPGKAPKLLIYSASFLYSGVPSRFSGSGSGTDFTLTISSLQPEDFATYYCQQYLYHPATFGQGTKVEIKR

SEQ ID NO: 163 - protein, 126 aa, Artificial Sequence
  Synthetic Sequence
EVQLVESGGGLVQPGGSLRLSCAASGFTLDYYAIGWFRQAPGKEREWASSISSSDGSTYYADSVKGRFTISRDNAKNTVFLQMNSLKPEDTAVYSCAASQAPITIATMMKPFYDYWGQGTQVTVSS

SEQ ID NO: 164 - protein, 123 aa, Artificial Sequence
  Synthetic Sequence
EVQLVESGGGLVQPGGSLRLSCAASGFTLDYYAKCWFRQAPGKEREWVSCISSSDGSTYYADSVKGRFTISRDNAKNTVYLQMNSLKPEDTAVYFCAARHGGPLTVEYFFDYWGQGTQVTVSS

SEQ ID NO: 165 - protein, 124 aa, Artificial Sequence
  Synthetic Sequence
EVQLVESGGGLVQPGGSLRLSCAASGFTFDYYAIGWFRQAPGKAREGVSCISGGDNSTYYADSVKGRFTISRDNAKNTVYLQMNSLKPEDTAVYYCATGGWKYCSGYDPEYIYWGQGTQVTVSS

SEQ ID NO: 166 - protein, 115 aa, Artificial Sequence
  Synthetic Sequence
EVQLVESGGGLVQAGGSLRLSCAASGSTFSQYDVGWYRQAPGKQRELVAFSSSGGRTIYPDSVKGRFTFSRDNTKNTVYLQMTSLKPEDTAVYYCKIDWYLNSYWGQGTQVTVSS

SEQ ID NO: 167 - protein, 114 aa, Artificial Sequence
  Synthetic Sequence
EVQLVESGGGLVQAGGSLRLSCAASGVDASNSAMGWYRQAPGKQREWVARITGGGLIAYTDSVKGRFTISRDNAKSTVYLQMNSLEPEDTAVYYCNTINSRDGWGQGTQVTVSS

SEQ ID NO: 168 - protein, 111 aa, Artificial Sequence
  Synthetic Sequence
EVQLVESGGGLVQAGGSLTISCAASGITFSDSIVSWYRRARGKQREWVAGISNGGTTKYAESVLGRFTISRDNAKNNVYLQMNGLNPEDTAVYLCKVRQYWGQGTQVTVSS

SEQ ID NO: 169 - protein, 130 aa, Artificial Sequence
  Synthetic Sequence
EVQLVESGGGLVQAGGSLRLSCAASESTVLINAMGWYRQAPGKQRELVASISSGGSTNYADSVKGRFTISRDNAKNTVYLQMNSLKPEDTAVYYCNADVYPQDYGLGYVEGKVYYGHDYWGTGTLVTVSS

SEQ ID NO: 170 - protein, 119 aa, Artificial Sequence
  Synthetic Sequence
EVQLVESGGGLVQAGGSLRLSCAASGSTFSNYVSNYAMGWGRQAPGTQRELVASISNGDTTNYADSVKGRFTISRDNAKNTVYLQMNSLKPEDTAVYYCFEHQVAGLTWGQGTQVTVSS

SEQ ID NO: 171 - protein, 118 aa, Artificial Sequence
  Synthetic Sequence
  misc_feature (27)..(27): Xaa can be any naturally occurring amino acid
  misc_feature (32)..(32): Xaa can be any naturally occurring amino acid
  misc_feature (75)..(75): Xaa can be any naturally occurring amino acid
EVQLVESGGGLVQAGGSLRLSCVASGXALKIXVMGWYRQAPGKQRELVAAITSGGRTNYSDSVKGRFTISGDNAXNTVYLQMNSLKSEDTAVYYCREWNSGYPPVDYWGQGTQVTVSS

SEQ ID NO: 172 - protein, 120 aa, Artificial Sequence
  Synthetic Sequence
EVQLVESGGGLVQAGGSLRLSCAASGRTFSSGTMGWFRRAPGKEREFVASIPWSGGRTYYADSVKDRFTISRDNAQNTVFLQMNSLKPEDTAVYYCAFKERSTGWDFASWGQGIQVTVSS

SEQ ID NO: 173 - protein, 127 aa, Artificial Sequence
  Synthetic Sequence
EVQLVESGGGLVQTGGSLRLSCAASGFTLDYYGIGWFRQAPGKEREGVSFISGSDGSTYYAESVKGRFTISRDKAKNTVYLQMNSLKPEDTAVYYCAADPWGPPSIATMTSYEYKHWGQGTQVTVSS

SEQ ID NO: 174 - protein, 113 aa, Artificial Sequence
  Synthetic Sequence
EVQLVESGGGLVQPGGSLRLSCAASGFTFSTYTMIWLRRAPGKGFEWVSTIDKDGNTNYVDSVKGRFAVSRDNTKNTLYLQMNSLKPEDTAMYYCTKHGSSARGQGTRVTVSS

SEQ ID NO: 175 - protein, 114 aa, Artificial Sequence
  Synthetic Sequence
EVQLVESGGGLVEPGGSLRLSCVASGFTFSSYDMSWVRQAPGKGLEWVSTINSGGGITYRGSVKGRFTISRDNAKNTLYLQMNSLKPEDTAVYYCENGGSSYRRGQGTQVTVSS

SEQ ID NO: 176 - protein, 114 aa, Artificial Sequence
  Synthetic Sequence
QVQLVQSGAELKKPGASVKMSCKASGYTFTGYTMHWVKQAPGQGLEWIGYINPRSGYTEYNQKFKDRTTLTADKSTSTAYMELSSLRSEDSAVYYCARPWFAYWGQGTLVTVSS

SEQ ID NO: 177 - protein, 114 aa, Artificial Sequence
  Synthetic Sequence
QVQLVQSGAEVKKPGASVKMSCKASGYTFTGYTMHWVKQAPGQGLEWIGYINPRSGYTEYNQKFKDRTTLTADKSTSTAYMELSSLRSEDTAVYYCARPWFAYWGQGTLVTVSS

SEQ ID NO: 178 - protein, 114 aa, Artificial Sequence
  Synthetic Sequence
QVQLVQSGAEVKKPGASVKMSCKASGYTFTGYTMHWVRQAPGQGLEWIGYINPRSGYTEYNQKFKDRTTLTADKSTSTAYMELSSLRSEDTAVYYCARPWFAYWGQGTLVTVSS

SEQ ID NO: 179 - protein, 114 aa, Artificial Sequence
  Synthetic Sequence
QVQLVQSGAEVKKPGASVKVSCKASGYTFTGYTMHWVRQAPGQGLEWIGYINPRSGYTEYNQKFKDRTTLTADKSTSTAYMELSSLRSEDTAVYYCARPWFAYWGQGTLVTVSS

SEQ ID NO: 180 - protein, 114 aa, Artificial Sequence
  Synthetic Sequence
QVQLVQSGAEVKKPGASVKVSCKASGYTFTGYTMHWVRQAPGQGLEWIGYINPRSGYTEYNQKFKDRTTITADKSTSTAYMELSSLRSEDTAVYYCARPWFAYWGQGTLVTVSS

SEQ ID NO: 181 - protein, 113 aa, Artificial Sequence
  Synthetic Sequence
DIVMTQSPASLTVTPGEKVTITCKSSQSLLNSGNQKNYLTWYQQKPGQPPKLLIYWASTRESGVPDRFTGSGSGTDFTLTISSLQAEDVAVYYCQNDYSYPLTFGQGTKLEIK

SEQ ID NO: 182 - protein, 113 aa, Artificial Sequence
  Synthetic Sequence
DIVMTQSPASLSVTPGEKVTITCKSSQSLLNSGNQKNYLTWYQQKPGQPPKLLIYWASTRESGVPDRFTGSGSGTDFTLTISSLQAEDVAVYYCQNDYSYPLTFGQGTKLEIK

SEQ ID NO: 183 - protein, 113 aa, Artificial Sequence
  Synthetic Sequence
DIVMTQSPAFLSVTPGEKVTITCKSSQSLLNSGNQKNYLTWYQQKPGQPPKLLIYWASTRESGVPDRFTGSGSGTDFTLTISSLQAEDVAVYYCQNDYSYPLTFGQGTKLEIK

SEQ ID NO: 184 - protein, 113 aa, Artificial Sequence
  Synthetic Sequence
DIVMTQSPAFLSVTPGEKVTITCKSSQSLLNSGNQKNYLTWYQQKPGQPPKLLIYWASTRESGVPDRFSGSGSGTDFTLTISSLQAEDVAVYYCQNDYSYPLTFGQGTKLEIK

SEQ ID NO: 185 - protein, 450 aa, Artificial Sequence
  Synthetic Sequence
QVQLQQSGAELARPGASVKMSCKASGYTFTRYTMHWVKQRPGQGLEWIGYINPSRGYTNYNQKFKDKATLTTDKSSSTAYMQLSSLTSEDSAVYYCARYYDDHYCLDYWGQGTTLTVSSAKTTAPSVYPLAPVCGGTTGSSVTLGCLVKGYFPEPVTLTWNSGSLSSGVHTFPAVLQSDLYTLSSSVTVTSSTWPSQSITCNVAHPASSTKVDKKIEPRPKSCDKTHTCPPCPAPELLGGPSVFLFPPKPKDTLMISRTPEVTCVVVDVSHEDPEVKFNWYVDGVEVHNAKTKPREEQYNSTYRVVSVLTVLHQDWLNGKEYKCKVSNKALPAPIEKTISKAKGQPREPQVYTLPPSRDELTKNQVSLTCLVKGFYPSDIAVEWESNGQPENNYKTTPPVLDSDGSFFLYSKLTVDKSRWQQGNVFSCSVMHEALHNHYTQKSLSLSPGK

SEQ ID NO: 186 - protein, 213 aa, Artificial Sequence
  Synthetic Sequence
QIVLTQSPAIMSASPGEKVTMTCSASSSVSYMNWYQQKSGTSPKRWIYDTSKLASGVPAHFRGSGSGTSYSLTISGMEAEDAATYYCQQWSSNPFTFGSGTKLEINRADTAPTVSIFPPSSEQLTSGGASVVCFLNNFYPKDINVKWKIDGSERQNGVLNSWTDQDSKDSTYSMSSTLTLTKDEYERHNSYTCEATHKTSTSPIVKSFNRNEC

SEQ ID NO: 187 - protein, 449 aa, Artificial Sequence
  Synthetic Sequence
EVQLLESGGGLVQPGGSLRLSCAASGFTFSSFPMAWVRQAPGKGLEWVSTISTSGGRTYYRDSVKGRFTISRDNSKNTLYLQMNSLRAEDTAVYYCAKFRQYSGGFDYWGQGTLVTVSSASTKGPSVFPLAPSSKSTSGGTAALGCLVKDYFPEPVTVSWNSGALTSGVHTFPAVLQSSGLYSLSSVVTVPSSSLGTQTYICNVNHKPSNTKVDKKVEPKSCDKTHTCPPCPAPELLGGPSVFLFPPKPKDTLMISRTPEVTCVVVDVSHEDPEVKFNWYVDGVEVHNAKTKPREEQYASTYRVVSVLTVLHQDWLNGKEYKCKVSNKALPAPIEKTISKAKGQPREPQVYTLPPSRDELTKNQVSLTCLVKGFYPSDIAVEWESNGQPENNYKTTPPVLDSDGSFFLYSKLTVDKSRWQQGNVFSCSVMHEALHNHYTQKSLSLSPGK

SEQ ID NO: 188 - protein, 216 aa, Artificial Sequence
  Synthetic Sequence
DIQLTQPNSVSTSLGSTVKLSCTLSSGNIENNYVHWYQLYEGRSPTTMIYDDDKRPDGVPDRFSGSIDRSSNSAFLTIHNVAIEDEAIYFCHSYVSSFNVFGGGTKLTVLRQPKAAPSVTLFPPSSEELQANKATLVCLISDFYPGAVTVAWKADSSPVKAGVETTTPSKQSNNKYAASSYLSLTPEQWKSHRSYSCQVTHEGSTVEKTVAPTECS

SEQ ID NO: 189 - protein, 449 aa, Artificial Sequence
  Synthetic Sequence
QVQLVQSGGGVVQPGRSLRLSCKASGYTFTRYTMHWVRQAPGKGLEWIGYINPSRGYTNYNQKVKDRFTISRDNSKNTAFLQMDSLRPEDTGVYFCARYYDDHYCLDYWGQGTPVTVSSASTKGPSVFPLAPSSKSTSGGTAALGCLVKDYFPEPVTVSWNSGALTSGVHTFPAVLQSSGLYSLSSVVTVPSSSLGTQTYICNVNHKPSNTKVDKKVEPKSCDKTHTCPPCPAPEAAGGPSVFLFPPKPKDTLMISRTPEVTCVVVDVSHEDPEVKFNWYVDGVEVHNAKTKPREEQYNSTYRVVSVLTVLHQDWLNGKEYKCKVSNKALPAPIEKTISKAKGQPREPQVYTLPPSRDELTKNQVSLTCLVKGFYPSDIAVEWESNGQPENNYKTTPPVLDSDGSFFLYSKLTVDKSRWQQGNVFSCSVMHEALHNHYTQKSLSLSPGK

SEQ ID NO: 190 - protein, 213 aa, Artificial Sequence
  Synthetic Sequence
DIQMTQSPSSLSASVGDRVTITCSASSSVSYMNWYQQTPGKAPKRWIYDTSKLASGVPSRFSGSGSGTDYTFTISSLQPEDIATYYCQQWSSNPFTFGQGTKLQITRTVAAPSVFIFPPSDEQLKSGTASVVCLLNNFYPREAKVQWKVDNALQSGNSQESVTEQDSKDSTYSLSSTLTLSKADYEKHKVYACEVTHQGLSSPVTKSFNRGEC

SEQ ID NO: 191 - protein, 120 aa, Artificial Sequence [sequence omitted]

SEQ ID NO: 192 - protein, 106 aa, Artificial Sequence [sequence omitted]

SEQ ID NO: 193 - protein, 118 aa, Artificial Sequence [sequence omitted]

SEQ ID NO: 194 - protein, 118 aa, Artificial Sequence
  Synthetic Sequence
QVQLVQSGGGVVQSGRSLRLSCAASGFKFSGYGMHWVRQAPGKGLEWVAVIWYDGSKKYYVDSVKGRFTISRDNSKNTLYLQMNSLRGEDTAVYYCARQMGYWHFDLWGRGTLVTVSS

SEQ ID NO: 195 - protein, 108 aa, Artificial Sequence [sequence omitted]

SEQ ID NO: 196 - protein, 108 aa, Artificial Sequence [sequence omitted]

SEQ ID NO: 197 - protein, 125 aa, Artificial Sequence
  Synthetic Sequence
EVKLVESGGGLVQPGGSLRLSCAASGFTFNTYAMNWVRQAPGKGLEWVARIRSKYNNYATYYADSVKDRFTISRDDSKSSLYLQMNNLKTEDTAMYYCVRHGNFGNSYVSWFAYWGQGTLVTVSS

SEQ ID NO: 198 - protein, 125 aa, Artificial Sequence
  Synthetic Sequence
EVKLVESGGGLVKPGRSLRLSCAASGFTFNTYAMNWVRQAPGKGLEWVARIRSKYNNYATYYADSVKDRFTISRDDSKSILYLQMNNLKTEDTAMYYCVRHGNFGNSYVSWFAYWGQGTLVTVSS

SEQ ID NO: 199 - protein, 125 aa, Artificial Sequence
  Synthetic Sequence
EVKLVESGGGLVKPGRSLRLSCAASGFTFNTYAMNWVRQAPGKGLEWVARIRSKYNNYATYYADSVKDRFTISRDDSKSILYLQMNSLKTEDTAMYYCVRHGNFGNSYVSWFAYWGQGTLVTVSS

SEQ ID NO: 200 - protein, 125 aa, Artificial Sequence
  Synthetic Sequence
EVKLVESGGGLVKPGRSLRLSCAASGFTFNTYAMNWVRQAPGKGLEWVARIRSKYNNYATYYADSVKDRFTISRDDSKSILYLQMNSLKTEDTAMYYCVRHGNFGNSYVSWFAYWGQGTMVTVSS

SEQ ID NO: 201 - protein, 109 aa, Artificial Sequence
  Synthetic Sequence
QAVVTQEPSFSVSPGGTVTLTCRSSTGAVTTSNYANWVQQTPGQAFRGLIGGTNKRAPGVPARFSGSLIGDKAALTITGAQADDESIYFCALWYSNLWVFGGGTKLTVL

SEQ ID NO: 202 - protein, 109 aa, Artificial Sequence
  Synthetic Sequence
QAVVTQEPSFSVSPGGTVTLTCRSSTGAVTTSNYANWVQQTPGQAFRGLIGGTNKRAPGVPARFSGSILGNKAALTITGAQADDESIYFCALWYSNLWVFGGGTKLTVL

SEQ ID NO: 203 - protein, 109 aa, Artificial Sequence
  Synthetic Sequence
QAVVTQEPSFSVSPGGTVTLTCRSSTGAVTTSNYANWVQQTPGQAFRGLIGGTNKRAPGVPARFSGSILGNKAALTITGAQADDESDYYCALWYSNLWVFGGGTKLTVL

SEQ ID NO: 204 - protein, 119 aa, Artificial Sequence
  Synthetic Sequence
QVQLVQSGSELKKPGASVKMSCKASGYTFTRYTMHWVRQAPGKGLEWIGYINPSRGYTNYNQKFKDRATLTTDKSTSTAYMQLSSLRSEDTAVYYCARYYDDHYSLDYWGQGTLVTVSS

SEQ ID NO: 205 - protein, 106 aa, Artificial Sequence
  Synthetic Sequence
QIVLTQSPATLSLSPGERATMSCSASSSVSYMNWYQQKPGKAPKRWIYDTSKLASGVPSRFRGSGSGTDYTLTISSLQPEDFATYYCQQWSSNPFTFGGGTKVEIK

SEQ ID NO: 206 - protein, 125 aa, Artificial Sequence
  Synthetic Sequence
ELQLVESGGGVVQPGRSLRLSCAASGFTFSSYGMHWVRQAPGKGLEWVAVISYDGSNKYYADSVKGRFTISRDNSKNTLYLQMNSLRSEDTAVYYCARLSPYCTNGVCWDAFDIWGQGTMVTVSS

SEQ ID NO: 207 - protein, 122 aa, Artificial Sequence
  Synthetic Sequence
ELQLVESGGGLVKPGRSLRLSCTASGFTFGDYAMSWFRQAPGKGLEWVGFIRSKAYGGTTEYAASVKGRFTISRDDSKSIAYLQMNSLKTEDTAVYYCTPQLWLLQDAFDIWGQGTMVTVSS

SEQ ID NO: 208 - protein, 120 aa, Artificial Sequence
  Synthetic Sequence
ELQLVESGPGLVKPSGTLSLTCAVSGGSISSRNWWSWVRQPPGKGLEWIGDIYHSGSTNYNPSLKSRVTISVDKSKNQFSLKLSSVTAADTAVYYCASGYTSCRDAFDIWGQGTMVTVSS

SEQ ID NO: 209 - protein, 126 aa, Artificial Sequence
  Synthetic Sequence
ELQLVEWGAGLLKPSETLSLTCAVYGGSFSGYYWSWIRQPPGKGLEWIGEINHSGSTNYNPSLKSRVTISVDTSKNQFSLKLSSVTAADTAVYYCARGRGRFLGWLLGGSNWFDPWGQGTLVTVSS

SEQ ID NO: 210 - protein, 119 aa, Artificial Sequence
  Synthetic Sequence
ELQLVEWGAGLLKPSETLSLTCAVYGGSFSGYYWSWIRQPPGKGLEWIGEINHSGSTNYNPSLKSRVTISVDTSKNQFSLKLSSVTAADTAVYYCARGPDRMGHGFDIWGQGTMVTVSS

SEQ ID NO: 211 - protein, 127 aa, Artificial Sequence
  Synthetic Sequence
ELQLVESGPGLVKPSQTLSLTCAISGDSVSSNSAAWNWIRQSPSRGLEWLGRTYYRSKWYNDYAVSVKSRITINPDTSKNQFSLQLNSVTPEDTAVYYCARDRRRIAARQYYGMDVWGQGTTVTVSS

SEQ ID NO: 212 - protein, 121 aa, Artificial Sequence
  Synthetic Sequence
ELQLVESGGGLVQPGGSLRLSCAASGFTFSSYAMGWVRQAPGKGLEWVSAVSGSGGSTYYADSVKGRFTISRDNSKNTLYLQMNSLRAEDTAVYYCAKAKFLGHYYGMDVWGQGTTVTVSS

SEQ ID NO: 213 - protein, 123 aa, Artificial Sequence
  Synthetic Sequence
ELQLVESGPVLVKPTDTLTLTCTVSGFSLNNPRMGVSWIRQPPGKTLEWLAHIFPSDAKAHSASLKSRLTISKDTSKSQVVPTMTNMDPVDTATYYCARILGEYYPPAWFDPWGQGTLVTVSS

SEQ ID NO: 214 - protein, 107 aa, Artificial Sequence
  Synthetic Sequence
ELQMTQSPSSLSASVGDRVSITCRASQTISNYLNWYQLKPGKAPKLLIYAASTLQSEVPTRFSGSGSGTDFTLTISGLHPEDFATYYCQQFNSYPRTFGQGTKVEIK

SEQ ID NO: 215 - protein, 107 aa, Artificial Sequence
  Synthetic Sequence
ELQMTQSPSSLSASVGDRVTITCRASQGISNYLAWYQQKPGKVPKLLIYAASTLQSGVPSRFSGSGSGTDFTLTISSLQPEDFATYYCQQSYSTPPTFGQGTKLEIK

SEQ ID NO: 216 - protein, 107 aa, Artificial Sequence
  Synthetic Sequence
ELVMTQSPSSLSASVGDRVTITCRASQGIGNYLAWYQQKPGQPPKMLIYWASIRESGVPDRFSGSGSGTDFTLTISSLQAEDVAVYYCQQYYSNPQTFGQGTKVEIK

SEQ ID NO: 217 - protein, 107 aa, Artificial Sequence
  Synthetic Sequence
ELVMTQSPSSLSASVGDRVTITCRASQGISNYLNWYQQKPGKAPKLLIYDASNLETGVPSRFSGSGSGTDFTLTISSLQPEDFATYYCQQSYSTPYTFGQGTKVDIK

SEQ ID NO: 218 - protein, 107 aa, Artificial Sequence
  Synthetic Sequence
ELQMTQSPSSLSASVGDRVTITCRASQSISSYLNWYQQKSGKAPKLLIYAASSLQSGVPSRFSGSGSGTDFTLTISSLQPEDFATYYCQQSYSSPWTFGQGTKVEIK

SEQ ID NO: 219 - protein, 108 aa, Artificial Sequence
  Synthetic Sequence
ELVLTQSPGTLSLSPGERATLSCRASQSVSSNYLAWYQQKPGQAPRLLIYGASSRATGIPDRFSGSGSGTDFTLTISSLQPEDVATYYCQKYNSAPLTFGGGTKVEIK

SEQ ID NO: 220 - protein, 107 aa, Artificial Sequence
  Synthetic Sequence
ELQMTQSPSSLSASVGDRVTITCRASQSISSYLNWYQQKPGKAPKLLIYAASSLQSGVPSRFSGSGSGTEFTLTISSLQPEDFATYYCLQHNAYPYTFGQGTKVEIK

SEQ ID NO: 221 - protein, 113 aa, Artificial Sequence
  Synthetic Sequence
ELVMTQSPDSLAVSLGERATINCKSSQSVLYSSNNKNYLAWYQQKPGQPPKLLIYWASTRESGVPDRFSGSGSGTDFTLTISSLQAEDVAVYYCQQYLKIPYTFGQGTKVEIK

SEQ ID NO: 222 - protein, 119 aa, Artificial Sequence
  Synthetic Sequence
QVQLVQSGAEVKKPGASVKVSCKASGYTFTRYTMHWVRQAPGQGLEWMGYINPSRGYTNYNQKFKDRVTMTTDTSISTAYMELSRLRSDDTAVYYCARYYDDHYCLDYWGQGTLVTVSS

SEQ ID NO: 223 - protein, 119 aa, Artificial Sequence
  Synthetic Sequence
QVQLVQSGAEVKKPGASVKVSCKASGYTFTRYTMHWVRQAPGQGLEWMGYINPSRGYTNYNQKFKDRVTMTTDTSISTAYMELSRLRSDDTAVYYCARYYDDHYSLDYWGQGTLVTVSS

SEQ ID NO: 224 - protein, 106 aa, Artificial Sequence
  Synthetic Sequence
EIVLTQSPATLSLSPGERATLSCSASSSVSYMNWYQQKPGQAPRLLIYDTSKLASGVPAHFRGSGSGTDYTLTISSLEPEDFAVYYCQQWSSNPFTFGQGTKVEIK

SEQ ID NO: 225 - protein, 125 aa, Artificial Sequence
  Synthetic Sequence
EVQLVESGGGLVQPGGSLRLSCAASGFTFSTYAMNWVRQAPGKGLEWVGRIRSKYNNYATYYADSVKDRFTISRDDSKNSLYLQMNSLKTEDTAVYYCARHGNFGNSYVSWFAYWGQGTLVTVSS

SEQ ID NO: 226 - protein, 125 aa, Artificial Sequence; identical to SEQ ID NO: 225
  Synthetic Sequence

SEQ ID NO: 227 - protein, 125 aa, Artificial Sequence
  Synthetic Sequence
EVQLVESGGGLVQPGGSLRLSCAASGFTFSTYAMNWVRQAPGKGLEWVGRIRSKYNNYATYYADSVKDRFTISRDDSKNSLYLQMNSLKTEDTAVYYCARHGNFGNSYVSYFAYWGQGTLVTVSS

SEQ ID NO: 228 - protein, 125 aa, Artificial Sequence
  Synthetic Sequence
EVQLVESGGGLVQPGGSLRLSCAASGFTFSTYAMNWVRQAPGKGLEWVGRIRSKYNNYATYYADSVKDRFTISRDDSKNSLYLQMNSLKTEDTAVYYCARHGNFGNSYVSHFAYWGQGTLVTVSS

SEQ ID NO: 229 - protein, 110 aa, Artificial Sequence
  Synthetic Sequence
DIQMTQSPSSLSASVGDRVTITCRSSTGAVTTSNYANWVQQKPGKAPKGLIGGTNKRAPGVPSRFSGSLIGDKATLTISSLQPEDFATYYCALWYSNLWVFGQGTKVEIK

SEQ ID NO: 230 - protein, 110 aa, Artificial Sequence
  Synthetic Sequence
DIQMTQSPSSLSASVGDRVTITCRSSTGAVTTSNYANWVQQKPGKAPKGLIGGTNKRAPGVPARFSGSGSGTDFTLTISSLQPEDFATYYCALWYSNLWVFGQGTKVEIK

SEQ ID NO: 231 - protein, 110 aa, Artificial Sequence
  Synthetic Sequence
DIQMTQSPSSLSASVGDRVTITCRSSTGAVTTSNYANWVQQKPGKAPKALIGGTNKRAPGVPSRFSGSLIGDKATLTISSLQPEDFATYYCALWYSNLWVFGQGTKVEIK

SEQ ID NO: 232 - protein, 110 aa, Artificial Sequence; identical to SEQ ID NO: 229
  Synthetic Sequence

SEQ ID NO: 233 - protein, 165 aa, Artificial Sequence
  Synthetic Sequence
CDLPQTHSLGSRRTLMLLAQMRKISLFSCLKDRHDFGFPQEEFGNQFQKAETIPVLHEMIQQIFNLFSTKDSSAAWDETLLDKFYTELYQQLNDLEACVIQGVGVTETPLMKEDSILAVRKYFQRITLYLKEKKYSPCAWEVVRAEIMRSFSLSTNLQESLRSKE

SEQ ID NO: 234 - protein, 165 aa, Artificial Sequence [sequence omitted]

SEQ ID NO: 235 - protein, 165 aa, Artificial Sequence
  Synthetic Sequence
APMAEGGGQNHHEVVKFMDVYQRSYCHPIETLVDIFQEYPDEIEYIFKPSCVPLMRCGGCCNDEGLECVPTEESNITMQIMRIKPHQGQHIGEMSFLQHNKCECRPKKDRARQENPCGPCSERRKHLFVQDPQTCKCSCKNTDSRCKARQLELNERTCRCDKPRR

SEQ ID NO: 236 - protein, 165 aa, Artificial Sequence
  Synthetic Sequence
APMAEGGGQNHHEVVKFMDVYQRSYCHPIETLVDIFQEYPDEIEYIFKPSCVPLMRCGGCCNDEGLECVPTEESNITMQIMRIKPHQGQHIGEMSFLQHNKCECRPKKDRARQENPCGPCSERRKHLFVQDPQTCKCSCKNTDSRCKARQLELNERTCRSLTRKD

SEQ ID NO: 237 - protein, 157 aa, Artificial Sequence [sequence omitted]

SEQ ID NO: 238 - protein, 171 aa, Artificial Sequence
  Synthetic Sequence
LPGVGLTPSAAQTARQHPKMHLAHSNLKPAAHLIGDPSKQNSLLWRANTDRAFLQDGFSLSNNSLLVPTSGIYFVYSQVVFSGKAYSPKATSSPLYLAHEVQLFSSQYPFHVPLLSSQKMVYPGLQEPWLHSMYHGAAFQLTQGDQLSTHTDGIPHLVLSPSTVFFGAFAL

SEQ ID NO: 239 - protein, 281 aa, Artificial Sequence [sequence omitted]

SEQ ID NO: 240 - protein, 153 aa, Artificial Sequence
  Synthetic Sequence
APVRSLNCTLRDSQQKSLVMSGPYELKALHLQGQDMEQQVVFSMSFVQGEESNDKIPVALGLKEKNLYLSCVLKDDKPTLQLESVDPKNYPKKKMEKRFVFNKIEINNKLEFESAQFPNWYISTSQAENMPVFLGGTKGGQDITDFTMQFVSS

SEQ ID NO: 241 - protein, 133 aa, Artificial Sequence [sequence omitted]

SEQ ID NO: 242 - protein, 129 aa, Artificial Sequence [sequence omitted]

SEQ ID NO: 243 - protein, 185 aa, Artificial Sequence
  Synthetic Sequence
APVPPGEDSKDVAAPHRQPLTSSERIDKQIRYILDGISALRKETCNKSNMCESSKEALAENNLNLPKMAEKDGCFQSGFNEETCLVKIITGLLEFEVYLEYLQNRFESSEEQARAVQMSTKVLIQFLQKKAKNLDAITTPDPTTNASLTTKLQAQNQWLQDMTTHLILRSFKEFLQSSLRALRQM

SEQ ID NO: 244 - protein, 114 aa, Artificial Sequence
  Synthetic Sequence
SPGPVPPSTALRELIEELVNITQNQKAPLCNGSMVWSINLTAGMYCAALESLINVSGCSAIEKTQRMLSGFCPHKVSAGQFSSLHVRDTKIEVAQFVKDLLLHLKKLFREGRFN

SEQ ID NO: 245 - protein, 194 aa, Artificial Sequence
  Synthetic Sequence
MAAEPVEDNCINFVAMKFIDNTLYFIAEDDENLESDYFGKLESKLSVIRNLNDQVLFIDQGNRPLFEDMTDSDCRDNAPRTIFIISMYKDSQPRGMAVTISVKCEKISTLSCENKIISFKEMNPPDNIKDTKSDIIFFQRSVPGHDNKMQFESSSYEGYFLACEKERDLFKLILKKEDELGDRSIMFTVQNEDL

SEQ ID NO: 246 - protein, 270 aa, Artificial Sequence
  Synthetic Sequence
MKPKMKYSTNKISTAKWKNTASKALCFKLGKSQQKAKEVCPMYFMKLRSGLMIKKEACYFRRETTKRPSLKTGRKHKRHLVLAACQQQSTVECFAFGISGVQKYTRALHDSSITGISPITEYLASLSTYNDQSITFALEDESYEIYVEDLKKDEKKDKVLLSYYESQHPSNESGDGVDGKMLMVTLSPTKDFWLHANNKEHSVELHKCEKPLPDQAFFVLHNMHSNCVSFECKTDPGVFIGVKDNHLALIKVDSSENLCTENILFKLSET

SEQ ID NO: 247 - protein, 193 aa, Artificial Sequence
  Synthetic Sequence
MGVHECPAWLWLLLSLLSLPLGLPVLGAPPRLICDSRVLERYLLEAKEAENITTGCAEHCSLNENITVPDTKVNFYAWKRMEVGQQAVEVWQGLALLSEAVLRGQALLVNSSQPWEPLQLHVDKAVSGLRSLTTLLRALGAQKEAISPPDAASAAPLRTITADTFRKLFRVYSNFLRGKLKLYTGEACRTGDR

SEQ ID NO: 248 - protein, 166 aa, Artificial Sequence
  Synthetic Sequence
APPRLICDSRVLERYLLEAKEAENITTGCAEHCSLNENITVPDTKVNFYAWKRMEVGQQAVEVWQGLALLSEAVLRGQALLVNSSQPWEPLQLHVDKAVSGLRSLTTLLRALGAQKEAISPPDAASAAPLRTITADTFRKLFRVYSNFLRGKLKLYTGEACRTGDR

SEQ ID NO: 249 - protein, 5 aa, Artificial Sequence
  Synthetic Sequence
GGGGS

SEQ ID NO: 250 - protein, 10 aa, Artificial Sequence
  Synthetic Sequence
GGGGSGGGGS

SEQ ID NO: 251 - protein, 15 aa, Artificial Sequence
  Synthetic Sequence
GGGGSGGGGSGGGGS

SEQ ID NO: 252 - protein, 20 aa, Artificial Sequence
  Synthetic Sequence
GGGGSGGGGSGGGGSGGGGS

SEQ ID NO: 253 - protein, 25 aa, Artificial Sequence
  Synthetic Sequence
GGGGSGGGGSGGGGSGGGGSGGGGS

SEQ ID NO: 254 - protein, 30 aa, Artificial Sequence
  Synthetic Sequence
GGGGSGGGGSGGGGSGGGGSGGGGSGGGGS

SEQ ID NO: 255 - protein, 35 aa, Artificial Sequence
  Synthetic Sequence
GGGGSGGGGSGGGGSGGGGSGGGGSGGGGSGGGGS

SEQ ID NO: 256 - protein, 40 aa, Artificial Sequence
  Synthetic Sequence
GGGGSGGGGSGGGGSGGGGSGGGGSGGGGSGGGGSGGGGS

SEQ ID NO: 257 - protein, 16 aa, Artificial Sequence
  Synthetic Sequence
GGSGGSGGGGSGGGGS

SEQ ID NO: 258 - protein, 8 aa, Artificial Sequence
  Synthetic Sequence
GGGGGGGG

SEQ ID NO: 259 - protein, 6 aa, Artificial Sequence
  Synthetic Sequence
GGGGGG

SEQ ID NO: 260 - protein, 5 aa, Artificial Sequence
  Synthetic Sequence
EAAAK

SEQ ID NO: 261 - protein, 10 aa, Artificial Sequence
  Synthetic Sequence
EAAAKEAAAK

SEQ ID NO: 262 - protein, 15 aa, Artificial Sequence
  Synthetic Sequence
EAAAKEAAAKEAAAK

SEQ ID NO: 263 - protein, 12 aa, Artificial Sequence
  Synthetic Sequence
AEAAAKEAAAKA

SEQ ID NO: 264 - protein, 17 aa, Artificial Sequence
  Synthetic Sequence
AEAAAKEAAAKEAAAKA

SEQ ID NO: 265 - protein, 22 aa, Artificial Sequence
  Synthetic Sequence
AEAAAKEAAAKEAAAKEAAAKA

SEQ ID NO: 266 - protein, 27 aa, Artificial Sequence
  Synthetic Sequence
AEAAAKEAAAKEAAAKEAAAKEAAAKA

SEQ ID NO: 267 - protein, 46 aa, Artificial Sequence
  Synthetic Sequence
AEAAAKEAAAKEAAAKEAAAKALEAEAAAKEAAAKEAAAKEAAAKA

SEQ ID NO: 268 - protein, 5 aa, Artificial Sequence
  Synthetic Sequence
PAPAP

SEQ ID NO: 269 - protein, 18 aa, Artificial Sequence
  Synthetic Sequence
KESGSVSSEQLAQFRSLD

SEQ ID NO: 270 - protein, 14 aa, Artificial Sequence
  Synthetic Sequence
EGKSSGSGSESKST

SEQ ID NO: 271 - protein, 12 aa, Artificial Sequence
  Synthetic Sequence
GSAGSAAGSGEF

SEQ ID NO: 272 - protein, 5 aa, Artificial Sequence
  Synthetic Sequence
GGGSE

SEQ ID NO: 273 - protein, 5 aa, Artificial Sequence
  Synthetic Sequence
GSESG

SEQ ID NO: 274 - protein, 5 aa, Artificial Sequence
  Synthetic Sequence
GSEGS

SEQ ID NO: 275 - protein, 35 aa, Artificial Sequence
  Synthetic Sequence
GEGGSGEGSSGEGSSSEGGGSEGGGSEGGGSEGGS

SEQ ID NO: 276 - protein, 4 aa, Artificial Sequence
  Synthetic Sequence
CPPC

SEQ ID NO: 277 - protein, 166 aa, Artificial Sequence
  Synthetic Sequence (Human IFN-beta)
MSYNLLGFLQRSSNFQCQKLLWQLNGRLEYCLKDRMNFDIPEEIKQLQQFQKEDAALTIYEMLQNIFAIFRQDSSSTGWNETIVENLLANVYHQINHLKTVLEEKLEKEDFTRGKLMSSLHLKRYYGRILHYLKAKEYSHCAWTIVRVEILRNFYFINRLTGYLRN

SEQ ID NO: 278 - protein, 167 aa, Artificial Sequence
  Synthetic Sequence (Consensus interferon)
MCDLPQTHSLGNRRALILLAQMRRISPFSCLKDRHDFGFPQEEFDGNQFQKAQAISVLHEMIQQTFNLFSTKDSSAAWDESLLEKFYTELYQQLNDLEACVIQEVGVEETPLMNVDSILAVKKYFQRITLYLTEKKYSPCAWEVVRAEIMRSFSLSTNLQERLRRKE

SEQ ID NO: 279 - protein, 166 aa, Artificial Sequence
  Synthetic Sequence (Consensus Interferon without methionine at the beginning)
CDLPQTHSLGNRRALILLAQMRRISPFSCLKDRHDFGFPQEEFDGNQFQKAQAISVLHEMIQQTFNLFSTKDSSAAWDESLLEKFYTELYQQLNDLEACVIQEVGVEETPLMNVDSILAVKKYFQRITLYLTEKKYSPCAWEVVRAEIMRSFSLSTNLQERLRRKE

SEQ ID NO: 280 - protein, 166 aa, Artificial Sequence
  Synthetic Sequence (IFN-Con2 (Consensus Interferon Variant 2))
CDLPQTHSLGNRRTLMLLAQMRRISPFSCLKDRHDFGFPQEEFDGNQFQKAQAISVLHEMIQQTFNLFSTKDSSAAWDESLLEKFYTELYQQLNDLEACVIQEVGVEETPLMNVDSILAVKKYFQRITLYLTEKKYSPCAWEVVRAEIMRSFSLSTNLQERLRRKE

SEQ ID NO: 281 - protein, 166 aa, Artificial Sequence
  Synthetic Sequence (IFN-Con3 (Consensus Interferon Variant 3))
CDLPQTHSLGNRRALILLAQMRRISPFSCLKDRHDFGFPQEEFDGNQFQKAQAISVLHEMIQQTFNLFSTKDSSAAWDESLLEKFYTELYQQLNDLEACVIQEVGVEETPLMNEDSILAVRKYFQRITLYLTEKKYSPCAWEVVRAEIMRSFSLSTNLQERLRRKE

SEQ ID NO: 282 - protein, 167 aa, Artificial Sequence
  Synthetic Sequence (Consensus Interferon Variant)
MCDLPQTHSLGNRRALILLAQMRRISPFSCLKDRHDFGFPQEEFDGNQFQKAQAISVLHEMIQQTFNLFSTKDSSAAWDESLLEKFYTELYQQLNDLEACVIQEVGVEETPLMNEDSILAVRKYFQRITLYLTEKKYSPCAWEVVRAEIMRSFSLSTNLQERLRRKE

SEQ ID NO: 283 - protein, 167 aa, Artificial Sequence
  Synthetic Sequence (Consensus Interferon Variant)
MCDLPQTHSLGNRRALILLAQMRRISPFSCLKDRHDFGFPQEEFDGNQFQKAQAISVLHEMIQQTFNLFSTKDSSAAWDESLLEKFYTELYQQLNDLEACVIQEVGVEETPLMNEDSILAVRKYFQRITLYLTEKKYSPCAWEVVRAEIMRSFSLCTNLQERLRRKE

SEQ ID NO: 284 - protein, 6 aa, Artificial Sequence
  Synthetic Sequence (human IFN-alpha2a)
EEFGNQ

SEQ ID NO: 285 - protein, 7 aa, Artificial Sequence
  Synthetic Sequence (human IFN-alpha2a)
EEFDGNQ

SEQ ID NO: 286-287 - skipped (2 entries)

SEQ ID NO: 288 - protein, 118 aa, Artificial Sequence
  Synthetic Sequence
QVQLQESGGGLAQAGGSLRLSCAASGRTFSMGWFRQAPGKEREFVAAITYSGGSPYYASSVRGRFTISRDNAKNTVYLQMNSLKPEDTAVYYCAANPTYGSDWNAENWGQGTQVTVSS

SEQ ID NO: 289 - skipped

SEQ ID NO: 290 - protein, 246 aa, Artificial Sequence
  Synthetic polymer.
MGWSCIIFFLVATATGVHSDKTHTCPPCPAPEAAGGPSVFLFPPKPKDTLMISRTPEVTCVVVDVSHEDPEVKFNWYVDGVEVHNAKTKPREEQYNSTYRVVSVLTVLHQDWLNGKEYKCQVSNKALPAPIEKTISKAKGQPREPQVCTLPPSRDELTKNQVSLSCAVKGFYPSDIAVEWESNGQPENNYKTTPPVLDSDGSFFLVSKLTVDKSRWQQGNVFSCSVMHEALHNHYTQKSLSLSPGK

SEQ ID NO: 291 - protein, 439 aa, Artificial Sequence
  Synthetic polymer.
MKLPVRLLVLMFWIPASSSDKTHTCPPCPAPEAAGGPSVFLFPPKPKDTLMISRTPEVTCVVVDVSHEDPEVKFNWYVDGVEVHNAKTKPREEQYNSTYRVVSVLTVLHQDWLNGKEYKCQVSNKALPAPIEKTISKAKGQPREPQVYTLPPCRDELTKNQVSLWCLVKGFYPSDIAVEWESNGQPENNYKTTPPVLDSDGSFFLYSKLTVDKSRWQQGNVFSCSVMHEALHNHYTQKSLSLSPGKGGSGGSGGSGGSGGSGGSGGSGGSGGSGGSGGSGGSGGSGGSGGSGGSGGSGGSGGSGGSAPTSSSTKKTQLQLEHLLLDLQMILNGINNYKNPKLTRMLTFKFYMPKKATELKHLQCLEEELKPLEEVLNLAQSKNFHLRPRDLISNINVIVLELKGSETTFMCEYADETATIVEFLNRWITFAQSIISTLT

SEQ ID NO: 292 - protein, 439 aa, Artificial Sequence
  Synthetic polymer.
MKLPVRLLVLMFWIPASSSDKTHTCPPCPAPEAAGGPSVFLFPPKPKDTLMISRTPEVTCVVVDVSHEDPEVKFNWYVDGVEVHNAKTKPREEQYNSTYRVVSVLTVLHQDWLNGKEYKCQVSNKALPAPIEKTISKAKGQPREPQVYTLPPCRDELTKNQVSLWCLVKGFYPSDIAVEWESNGQPENNYKTTPPVLDSDGSFFLYSKLTVDKSRWQQGNVFSCSVMHEALHNHYTQKSLSLSPGKGGSGGSGGSGGSGGSGGSGGSGGSGGSGGSGGSGGSGGSGGSGGSGGSGGSGGSGGSGGSAPTSSSTKKTQLQLEHLLLDLQMILNGINNYKNPKLTAMLTYKFYMPKKATELKHLQCLEEALKPLEEVLNLAQSKNFHLRPRDLISNINVIVLELKGSETTFMCEYADETATIVEFLNRWITFAQSIISTLT

SEQ ID NO: 293 - protein, 439 aa, Artificial Sequence
  Synthetic polymer.
MKLPVRLLVLMFWIPASSSDKTHTCPPCPAPEAAGGPSVFLFPPKPKDTLMISRTPEVTCVVVDVSHEDPEVKFNWYVDGVEVHNAKTKPREEQYNSTYRVVSVLTVLHQDWLNGKEYKCQVSNKALPAPIEKTISKAKGQPREPQVYTLPPCRDELTKNQVSLWCLVKGFYPSDIAVEWESNGQPENNYKTTPPVLDSDGSFFLYSKLTVDKSRWQQGNVFSCSVMHEALHNHYTQKSLSLSPGKGGSGGSGGSGGSGGSGGSGGSGGSGGSGGSGGSGGSGGSGGSGGSGGSGGSGGSGGSGGSAPTSSSTKKTQLQLEHLLLDLQMILNGINNYKNPKLTRMLTYKFAMPKKATELKHLQCLEEELKPLEEVLNGAQSKNFHLRPRDLISNINVIVLELKGSETTFMCEYADETATIVEFLNRWITFAQSIISTLT

SEQ ID NO: 294 - protein, 439 aa, Artificial Sequence
  Synthetic polymer.
MKLPVRLLVLMFWIPASSSDKTHTCPPCPAPEAAGGPSVFLFPPKPKDTLMISRTPEVTCVVVDVSHEDPEVKFNWYVDGVEVHNAKTKPREEQYNSTYRVVSVLTVLHQDWLNGKEYKCQVSNKALPAPIEKTISKAKGQPREPQVYTLPPCRDELTKNQVSLWCLVKGFYPSDIAVEWESNGQPENNYKTTPPVLDSDGSFFLYSKLTVDKSRWQQGNVFSCSVMHEALHNHYTQKSLSLSPGKGGSGGSGGSGGSGGSGGSGGSGGSGGSGGSGGSGGSGGSGGSGGSGGSGGSGGSGGSGGSAPTSSSTKKTQLQLEHLLLDLQMILNGINNYKNPKLTRMLTKKFYMPKKATELKHLQCLEEELKPLEEVLNLAQSKNFHLRPRDLISNINVIVLELKGSETTFMCEYADETATIVEFLNRWITFAQSIISTLT

SEQ ID NO: 295 - protein, 439 aa, Artificial Sequence
  Synthetic polymer.
MKLPVRLLVLMFWIPASSSDKTHTCPPCPAPEAAGGPSVFLFPPKPKDTLMISRTPEVTCVVVDVSHEDPEVKFNWYVDGVEVHNAKTKPREEQYNSTYRVVSVLTVLHQDWLNGKEYKCQVSNKALPAPIEKTISKAKGQPREPQVYTLPPCRDELTKNQVSLWCLVKGFYPSDIAVEWESNGQPENNYKTTPPVLDSDGSFFLYSKLTVDKSRWQQGNVFSCSVMHEALHNHYTQKSLSLSPGKGGSGGSGGSGGSGGSGGSGGSGGSGGSGGSGGSGGSGGSGGSGGSGGSGGSGGSGGSGGSAPTSSSTKKTQLQLEHLLLDLQMILNGINNYKNPKLTAMLTKKFYMPKKATELKHLQCLEEELKPLEEVLNLAQSKNFHLRPRDLISNINVIVLELKGSETTFMCEYADETATIVEFLNRWITFAQSIISTLT

SEQ ID NO: 296 - protein, 439 aa, Artificial Sequence
  Synthetic polymer.
MKLPVRLLVLMFWIPASSSDKTHTCPPCPAPEAAGGPSVFLFPPKPKDTLMISRTPEVTCVVVDVSHEDPEVKFNWYVDGVEVHNAKTKPREEQYNSTYRVVSVLTVLHQDWLNGKEYKCQVSNKALPAPIEKTISKAKGQPREPQVYTLPPCRDELTKNQVSLWCLVKGFYPSDIAVEWESNGQPENNYKTTPPVLDSDGSFFLYSKLTVDKSRWQQGNVFSCSVMHEALHNHYTQKSLSLSPGKGGSGGSGGSGGSGGSGGSGGSGGSGGSGGSGGSGGSGGSGGSGGSGGSGGSGGSGGSGGSAPTSSSTKKTQLQLEHLLLDLQMILNGINNYKNPKLTRMLTFKFYMPKKATELKHLQCLEQELKPLEEVLNLAQSKNFHLRPRDLISNINVIVLELKGSETTFMCEYADETATIVEFLNRWITFAQSIISTLT

SEQ ID NO: 297 - protein, 426 aa, Artificial Sequence
  Synthetic polymer.
MGWSCIIFFLVATATGVHSQVQLQESGGGLVQPGGSLRLSCAASGSIFSINVMGWYRQTPGKERELVAKITNFGITSYADSAQGRFTISRGNAKNTVYLQMNSLKPEDTAVYYCNLDTTGWGPPPYQYWGQGTQVTVSSGGSGGSGGSGGSGGSGGSGGSGGSGGSGGSGGSGGSGGSGGSGGSGGSGGSGGSGGSGGSDKTHTCPPCPAPEAAGGPSVFLFPPKPKDTLMISRTPEVTCVVVDVSHEDPEVKFNWYVDGVEVHNAKTKPREEQYNSTYRVVSVLTVLHQDWLNGKEYKCQVSNKALPAPIEKTISKAKGQPREPQVCTLPPSRDELTKNQVSLSCAVKGFYPSDIAVEWESNGQPENNYKTTPPVLDSDGSFFLVSKLTVDKSRWQQGNVFSCSVMHEALHNHYTQKSLSLSPGK

SEQ ID NO: 298 - protein, 439 aa, Artificial Sequence
  Synthetic polymer.
MKLPVRLLVLMFWIPASSSDKTHTCPPCPAPEAAGGPSVFLFPPKPKDTLMISRTPEVTCVVVDVSHEDPEVKFNWYVDGVEVHNAKTKPREEQYNSTYRVVSVLTVLHQDWLNGKEYKCQVSNKALPAPIEKTISKAKGQPREPQVYTLPPCRDELTKNQVSLWCLVKGFYPSDIAVEWESNGQPENNYKTTPPVLDSDGSFFLYSKLTVDKSRWQQGNVFSCSVMHEALHNHYTQKSLSLSPGKGGSGGSGGSGGSGGSGGSGGSGGSGGSGGSGGSGGSGGSGGSGGSGGSGGSGGSGGSGGSAPTSSSTKKTQLQLEHLLLALQMILNGINNYKNPKLTRMLTFKFYMPKKATELKHLQCLEEELKPLEEVLNLAQSKNFHLRPRDLISNINVIVLELKGSETTFMCEYADETATIVEFLNRWITFAQSIISTLT

SEQ ID NO: 299 - protein, 439 aa, Artificial Sequence
  Synthetic polymer.
MKLPVRLLVLMFWIPASSSDKTHTCPPCPAPEAAGGPSVFLFPPKPKDTLMISRTPEVTCVVVDVSHEDPEVKFNWYVDGVEVHNAKTKPREEQYNSTYRVVSVLTVLHQDWLNGKEYKCQVSNKALPAPIEKTISKAKGQPREPQVYTLPPCRDELTKNQVSLWCLVKGFYPSDIAVEWESNGQPENNYKTTPPVLDSDGSFFLYSKLTVDKSRWQQGNVFSCSVMHEALHNHYTQKSLSLSPGKGGSGGSGGSGGSGGSGGSGGSGGSGGSGGSGGSGGSGGSGGSGGSGGSGGSGGSGGSGGSAPTSSSTKKTQLQLEHLLLELQMILNGINNYKNPKLTRMLTFKFYMPKKATELKHLQCLEEELKPLEEVLNLAQSKNFHLRPRDLISNINVIVLELKGSETTFMCEYADETATIVEFLNRWITFAQSIISTLT

SEQ ID NO: 300 - protein, 439 aa, Artificial Sequence
  Synthetic polymer.
MKLPVRLLVLMFWIPASSSDKTHTCPPCPAPEAAGGPSVFLFPPKPKDTLMISRTPEVTCVVVDVSHEDPEVKFNWYVDGVEVHNAKTKPREEQYNSTYRVVSVLTVLHQDWLNGKEYKCQVSNKALPAPIEKTISKAKGQPREPQVYTLPPCRDELTKNQVSLWCLVKGFYPSDIAVEWESNGQPENNYKTTPPVLDSDGSFFLYSKLTVDKSRWQQGNVFSCSVMHEALHNHYTQKSLSLSPGKGGSGGSGGSGGSGGSGGSGGSGGSGGSGGSGGSGGSGGSGGSGGSGGSGGSGGSGGSGGSAPTSSSTKKTQLQLEHLLLFLQMILNGINNYKNPKLTRMLTFKFYMPKKATELKHLQCLEEELKPLEEVLNLAQSKNFHLRPRDLISNINVIVLELKGSETTFMCEYADETATIVEFLNRWITFAQSIISTLT

SEQ ID NO: 301 - protein, 439 aa, Artificial Sequence
  Synthetic polymer.
MKLPVRLLVLMFWIPASSSDKTHTCPPCPAPEAAGGPSVFLFPPKPKDTLMISRTPEVTCVVVDVSHEDPEVKFNWYVDGVEVHNAKTKPREEQYNSTYRVVSVLTVLHQDWLNGKEYKCQVSNKALPAPIEKTISKAKGQPREPQVYTLPPCRDELTKNQVSLWCLVKGFYPSDIAVEWESNGQPENNYKTTPPVLDSDGSFFLYSKLTVDKSRWQQGNVFSCSVMHEALHNHYTQKSLSLSPGKGGSGGSGGSGGSGGSGGSGGSGGSGGSGGSGGSGGSGGSGGSGGSGGSGGSGGSGGSGGSAPTSSSTKKTQLQLEHLLLGLQMILNGINNYKNPKLTRMLTFKFYMPKKATELKHLQCLEEELKPLEEVLNLAQSKNFHLRPRDLISNINVIVLELKGSETTFMCEYADETATIVEFLNRWITFAQSIISTLT

SEQ ID NO: 302 - protein, 439 aa, Artificial Sequence
  Synthetic polymer.
MKLPVRLLVLMFWIPASSSDKTHTCPPCPAPEAAGGPSVFLFPPKPKDTLMISRTPEVTCVVVDVSHEDPEVKFNWYVDGVEVHNAKTKPREEQYNSTYRVVSVLTVLHQDWLNGKEYKCQVSNKALPAPIEKTISKAKGQPREPQVYTLPPCRDELTKNQVSLWCLVKGFYPSDIAVEWESNGQPENNYKTTPPVLDSDGSFFLYSKLTVDKSRWQQGNVFSCSVMHEALHNHYTQKSLSLSPGKGGSGGSGGSGGSGGSGGSGGSGGSGGSGGSGGSGGSGGSGGSGGSGGSGGSGGSGGSGGSAPTSSSTKKTQLQLEHLLLHLQMILNGINNYKNPKLTRMLTFKFYMPKKATELKHLQCLEEELKPLEEVLNLAQSKNFHLRPRDLISNINVIVLELKGSETTFMCEYADETATIVEFLNRWITFAQSIISTLT

SEQ ID NO: 303 - protein, 439 aa, Artificial Sequence
  Synthetic polymer.
MKLPVRLLVLMFWIPASSSDKTHTCPPCPAPEAAGGPSVFLFPPKPKDTLMISRTPEVTCVVVDVSHEDPEVKFNWYVDGVEVHNAKTKPREEQYNSTYRVVSVLTVLHQDWLNGKEYKCQVSNKALPAPIEKTISKAKGQPREPQVYTLPPCRDELTKNQVSLWCLVKGFYPSDIAVEWESNGQPENNYKTTPPVLDSDGSFFLYSKLTVDKSRWQQGNVFSCSVMHEALHNHYTQKSLSLSPGKGGSGGSGGSGGSGGSGGSGGSGGSGGSGGSGGSGGSGGSGGSGGSGGSGGSGGSGGSGGSAPTSSSTKKTQLQLEHLLLILQMILNGINNYKNPKLTRMLTFKFYMPKKATELKHLQCLEEELKPLEEVLNLAQSKNFHLRPRDLISNINVIVLELKGSETTFMCEYADETATIVEFLNRWITFAQSIISTLT

SEQ ID NO: 304 - protein, 439 aa, Artificial Sequence
  Synthetic polymer.
MKLPVRLLVLMFWIPASSSDKTHTCPPCPAPEAAGGPSVFLFPPKPKDTLMISRTPEVTCVVVDVSHEDPEVKFNWYVDGVEVHNAKTKPREEQYNSTYRVVSVLTVLHQDWLNGKEYKCQVSNKALPAPIEKTISKAKGQPREPQVYTLPPCRDELTKNQVSLWCLVKGFYPSDIAVEWESNGQPENNYKTTPPVLDSDGSFFLYSKLTVDKSRWQQGNVFSCSVMHEALHNHYTQKSLSLSPGKGGSGGSGGSGGSGGSGGSGGSGGSGGSGGSGGSGGSGGSGGSGGSGGSGGSGGSGGSGGSAPTSSSTKKTQLQLEHLLLKLQMILNGINNYKNPKLTRMLTFKFYMPKKATELKHLQCLEEELKPLEEVLNLAQSKNFHLRPRDLISNINVIVLELKGSETTFMCEYADETATIVEFLNRWITFAQSIISTLT

SEQ ID NO: 305 - protein, 439 aa, Artificial Sequence
  Synthetic polymer.
MKLPVRLLVLMFWIPASSSDKTHTCPPCPAPEAAGGPSVFLFPPKPKDTLMISRTPEVTCVVVDVSHEDPEVKFNWYVDGVEVHNAKTKPREEQYNSTYRVVSVLTVLHQDWLNGKEYKCQVSNKALPAPIEKTISKAKGQPREPQVYTLPPCRDELTKNQVSLWCLVKGFYPSDIAVEWESNGQPENNYKTTPPVLDSDGSFFLYSKLTVDKSRWQQGNVFSCSVMHEALHNHYTQKSLSLSPGKGGSGGSGGSGGSGGSGGSGGSGGSGGSGGSGGSGGSGGSGGSGGSGGSGGSGGSGGSGGSAPTSSSTKKTQLQLEHLLLLLQMILNGINNYKNPKLTRMLTFKFYMPKKATELKHLQCLEEELKPLEEVLNLAQSKNFHLRPRDLISNINVIVLELKGSETTFMCEYADETATIVEFLNRWITFAQSIISTLT

SEQ ID NO: 306 - protein, 439 aa, Artificial Sequence
  Synthetic polymer.
MKLPVRLLVLMFWIPASSSDKTHTCPPCPAPEAAGGPSVFLFPPKPKDTLMISRTPEVTCVVVDVSHEDPEVKFNWYVDGVEVHNAKTKPREEQYNSTYRVVSVLTVLHQDWLNGKEYKCQVSNKALPAPIEKTISKAKGQPREPQVYTLPPCRDELTKNQVSLWCLVKGFYPSDIAVEWESNGQPENNYKTTPPVLDSDGSFFLYSKLTVDKSRWQQGNVFSCSVMHEALHNHYTQKSLSLSPGKGGSGGSGGSGGSGGSGGSGGSGGSGGSGGSGGSGGSGGSGGSGGSGGSGGSGGSGGSGGSAPTSSSTKKTQLQLEHLLLNLQMILNGINNYKNPKLTRMLTFKFYMPKKATELKHLQCLEEELKPLEEVLNLAQSKNFHLRPRDLISNINVIVLELKGSETTFMCEYADETATIVEFLNRWITFAQSIISTLT

SEQ ID NO: 307 - protein, 439 aa, Artificial Sequence
  Synthetic polymer.
MKLPVRLLVLMFWIPASSSDKTHTCPPCPAPEAAGGPSVFLFPPKPKDTLMISRTPEVTCVVVDVSHEDPEVKFNWYVDGVEVHNAKTKPREEQYNSTYRVVSVLTVLHQDWLNGKEYKCQVSNKALPAPIEKTISKAKGQPREPQVYTLPPCRDELTKNQVSLWCLVKGFYPSDIAVEWESNGQPENNYKTTPPVLDSDGSFFLYSKLTVDKSRWQQGNVFSCSVMHEALHNHYTQKSLSLSPGKGGSGGSGGSGGSGGSGGSGGSGGSGGSGGSGGSGGSGGSGGSGGSGGSGGSGGSGGSGGSAPTSSSTKKTQLQLEHLLLPLQMILNGINNYKNPKLTRMLTFKFYMPKKATELKHLQCLEEELKPLEEVLNLAQSKNFHLRPRDLISNINVIVLELKGSETTFMCEYADETATIVEFLNRWITFAQSIISTLT

SEQ ID NO: 308 - protein, 439 aa, Artificial Sequence
  Synthetic polymer.
MKLPVRLLVLMFWIPASSSDKTHTCPPCPAPEAAGGPSVFLFPPKPKDTLMISRTPEVTCVVVDVSHEDPEVKFNWYVDGVEVHNAKTKPREEQYNSTYRVVSVLTVLHQDWLNGKEYKCQVSNKALPAPIEKTISKAKGQPREPQVYTLPPCRDELTKNQVSLWCLVKGFYPSDIAVEWESNGQPENNYKTTPPVLDSDGSFFLYSKLTVDKSRWQQGNVFSCSVMHEALHNHYTQKSLSLSPGKGGSGGSGGSGGSGGSGGSGGSGGSGGSGGSGGSGGSGGSGGSGGSGGSGGSGGSGGSGGSAPTSSSTKKTQLQLEHLLLQLQMILNGINNYKNPKLTRMLTFKFYMPKKATELKHLQCLEEELKPLEEVLNLAQSKNFHLRPRDLISNINVIVLELKGSETTFMCEYADETATIVEFLNRWITFAQSIISTLT

SEQ ID NO: 309 - protein, 439 aa, Artificial Sequence
  Synthetic polymer.
MKLPVRLLVLMFWIPASSSDKTHTCPPCPAPEAAGGPSVFLFPPKPKDTLMISRTPEVTCVVVDVSHEDPEVKFNWYVDGVEVHNAKTKPREEQYNSTYRVVSVLTVLHQDWLNGKEYKCQVSNKALPAPIEKTISKAKGQPREPQVYTLPPCRDELTKNQVSLWCLVKGFYPSDIAVEWESNGQPENNYKTTPPVLDSDGSFFLYSKLTVDKSRWQQGNVFSCSVMHEALHNHYTQKSLSLSPGKGGSGGSGGSGGSGGSGGSGGSGGSGGSGGSGGSGGSGGSGGSGGSGGSGGSGGSGGSGGSAPTSSSTKKTQLQLEHLLLRLQMILNGINNYKNPKLTRMLTFKFYMPKKATELKHLQCLEEELKPLEEVLNLAQSKNFHLRPRDLISNINVIVLELKGSETTFMCEYADETATIVEFLNRWITFAQSIISTLT

SEQ ID NO: 310 - protein, 439 aa, Artificial Sequence
  Synthetic polymer.
MKLPVRLLVLMFWIPASSSDKTHTCPPCPAPEAAGGPSVFLFPPKPKDTLMISRTPEVTCVVVDVSHEDPEVKFNWYVDGVEVHNAKTKPREEQYNSTYRVVSVLTVLHQDWLNGKEYKCQVSNKALPAPIEKTISKAKGQPREPQVYTLPPCRDELTKNQVSLWCLVKGFYPSDIAVEWESNGQPENNYKTTPPVLDSDGSFFLYSKLTVDKSRWQQGNVFSCSVMHEALHNHYTQKSLSLSPGKGGSGGSGGSGGSGGSGGSGGSGGSGGSGGSGGSGGSGGSGGSGGSGGSGGSGGSGGSGGSAPTSSSTKKTQLQLEHLLLSLQMILNGINNYKNPKLTRMLTFKFYMPKKATELKHLQCLEEELKPLEEVLNLAQSKNFHLRPRDLISNINVIVLELKGSETTFMCEYADETATIVEFLNRWITFAQSIISTLT

SEQ ID NO: 311 - protein, 439 aa, Artificial Sequence
  Synthetic polymer.
MKLPVRLLVLMFWIPASSSDKTHTCPPCPAPEAAGGPSVFLFPPKPKDTLMISRTPEVTCVVVDVSHEDPEVKFNWYVDGVEVHNAKTKPREEQYNSTYRVVSVLTVLHQDWLNGKEYKCQVSNKALPAPIEKTISKAKGQPREPQVYTLPPCRDELTKNQVSLWCLVKGFYPSDIAVEWESNGQPENNYKTTPPVLDSDGSFFLYSKLTVDKSRWQQGNVFSCSVMHEALHNHYTQKSLSLSPGKGGSGGSGGSGGSGGSGGSGGSGGSGGSGGSGGSGGSGGSGGSGGSGGSGGSGGSGGSGGSAPTSSSTKKTQLQLEHLLLTLQMILNGINNYKNPKLTRMLTFKFYMPKKATELKHLQCLEEELKPLEEVLNLAQSKNFHLRPRDLISNINVIVLELKGSETTFMCEYADETATIVEFLNRWITFAQSIISTLT

SEQ ID NO: 312 - protein, 439 aa, Artificial Sequence
  Synthetic polymer.
MKLPVRLLVLMFWIPASSSDKTHTCPPCPAPEAAGGPSVFLFPPKPKDTLMISRTPEVTCVVVDVSHEDPEVKFNWYVDGVEVHNAKTKPREEQYNSTYRVVSVLTVLHQDWLNGKEYKCQVSNKALPAPIEKTISKAKGQPREPQVYTLPPCRDELTKNQVSLWCLVKGFYPSDIAVEWESNGQPENNYKTTPPVLDSDGSFFLYSKLTVDKSRWQQGNVFSCSVMHEALHNHYTQKSLSLSPGKGGSGGSGGSGGSGGSGGSGGSGGSGGSGGSGGSGGSGGSGGSGGSGGSGGSGGSGGSGGSAPTSSSTKKTQLQLEHLLLVLQMILNGINNYKNPKLTRMLTFKFYMPKKATELKHLQCLEEELKPLEEVLNLAQSKNFHLRPRDLISNINVIVLELKGSETTFMCEYADETATIVEFLNRWITFAQSIISTLT

SEQ ID NO: 313 - protein, 439 aa, Artificial Sequence
  Synthetic polymer.
MKLPVRLLVLMFWIPASSSDKTHTCPPCPAPEAAGGPSVFLFPPKPKDTLMISRTPEVTCVVVDVSHEDPEVKFNWYVDGVEVHNAKTKPREEQYNSTYRVVSVLTVLHQDWLNGKEYKCQVSNKALPAPIEKTISKAKGQPREPQVYTLPPCRDELTKNQVSLWCLVKGFYPSDIAVEWESNGQPENNYKTTPPVLDSDGSFFLYSKLTVDKSRWQQGNVFSCSVMHEALHNHYTQKSLSLSPGKGGSGGSGGSGGSGGSGGSGGSGGSGGSGGSGGSGGSGGSGGSGGSGGSGGSGGSGGSGGSAPTSSSTKKTQLQLEHLLLWLQMILNGINNYKNPKLTRMLTFKFYMPKKATELKHLQCLEEELKPLEEVLNLAQSKNFHLRPRDLISNINVIVLELKGSETTFMCEYADETATIVEFLNRWITFAQSIISTLT

SEQ ID NO: 314 - protein, 439 aa, Artificial Sequence
  Synthetic polymer.
MKLPVRLLVLMFWIPASSSDKTHTCPPCPAPEAAGGPSVFLFPPKPKDTLMISRTPEVTCVVVDVSHEDPEVKFNWYVDGVEVHNAKTKPREEQYNSTYRVVSVLTVLHQDWLNGKEYKCQVSNKALPAPIEKTISKAKGQPREPQVYTLPPCRDELTKNQVSLWCLVKGFYPSDIAVEWESNGQPENNYKTTPPVLDSDGSFFLYSKLTVDKSRWQQGNVFSCSVMHEALHNHYTQKSLSLSPGKGGSGGSGGSGGSGGSGGSGGSGGSGGSGGSGGSGGSGGSGGSGGSGGSGGSGGSGGSGGSAPTSSSTKKTQLQLEHLLLYLQMILNGINNYKNPKLTRMLTFKFYMPKKATELKHLQCLEEELKPLEEVLNLAQSKNFHLRPRDLISNINVIVLELKGSETTFMCEYADETATIVEFLNRWITFAQSIISTLT

SEQ ID NO: 315 - protein, 439 aa, Artificial Sequence
  Synthetic polymer.
MKLPVRLLVLMFWIPASSSDKTHTCPPCPAPEAAGGPSVFLFPPKPKDTLMISRTPEVTCVVVDVSHEDPEVKFNWYVDGVEVHNAKTKPREEQYNSTYRVVSVLTVLHQDWLNGKEYKCQVSNKALPAPIEKTISKAKGQPREPQVYTLPPCRDELTKNQVSLWCLVKGFYPSDIAVEWESNGQPENNYKTTPPVLDSDGSFFLYSKLTVDKSRWQQGNVFSCSVMHEALHNHYTQKSLSLSPGKGGSGGSGGSGGSGGSGGSGGSGGSGGSGGSGGSGGSGGSGGSGGSGGSGGSGGSGGSGGSAPTSSSTKKTQLQLEHLLLDLQMILNGINNYKNPKLTRMLTFKFYMPKKATELKHLQCLEEELKPLEEVLNLAQSKNFHLRPRDLISNIAVIVLELKGSETTFMCEYADETATIVEFLNRWITFAQSIISTLT

SEQ ID NO: 316 - protein, 439 aa, Artificial Sequence
  Synthetic polymer.
MKLPVRLLVLMFWIPASSSDKTHTCPPCPAPEAAGGPSVFLFPPKPKDTLMISRTPEVTCVVVDVSHEDPEVKFNWYVDGVEVHNAKTKPREEQYNSTYRVVSVLTVLHQDWLNGKEYKCQVSNKALPAPIEKTISKAKGQPREPQVYTLPPCRDELTKNQVSLWCLVKGFYPSDIAVEWESNGQPENNYKTTPPVLDSDGSFFLYSKLTVDKSRWQQGNVFSCSVMHEALHNHYTQKSLSLSPGKGGSGGSGGSGGSGGSGGSGGSGGSGGSGGSGGSGGSGGSGGSGGSGGSGGSGGSGGSGGSAPTSSSTKKTQLQLEHLLLDLQMILNGINNYKNPKLTRMLTFKFYMPKKATELKHLQCLEEELKPLEEVLNLAQSKNFHLRPRDLISNIDVIVLELKGSETTFMCEYADETATIVEFLNRWITFAQSIISTLT

SEQ ID NO: 317 - protein, 439 aa, Artificial Sequence
  Synthetic polymer.
MKLPVRLLVLMFWIPASSSDKTHTCPPCPAPEAAGGPSVFLFPPKPKDTLMISRTPEVTCVVVDVSHEDPEVKFNWYVDGVEVHNAKTKPREEQYNSTYRVVSVLTVLHQDWLNGKEYKCQVSNKALPAPIEKTISKAKGQPREPQVYTLPPCRDELTKNQVSLWCLVKGFYPSDIAVEWESNGQPENNYKTTPPVLDSDGSFFLYSKLTVDKSRWQQGNVFSCSVMHEALHNHYTQKSLSLSPGKGGSGGSGGSGGSGGSGGSGGSGGSGGSGGSGGSGGSGGSGGSGGSGGSGGSGGSGGSGGSAPTSSSTKKTQLQLEHLLLDLQMILNGINNYKNPKLTRMLTFKFYMPKKATELKHLQCLEEELKPLEEVLNLAQSKNFHLRPRDLISNIEVIVLELKGSETTFMCEYADETATIVEFLNRWITFAQSIISTLT

SEQ ID NO: 318 - protein, 439 aa, Artificial Sequence
  Synthetic polymer.
MKLPVRLLVLMFWIPASSSDKTHTCPPCPAPEAAGGPSVFLFPPKPKDTLMISRTPEVTCVVVDVSHEDPEVKFNWYVDGVEVHNAKTKPREEQYNSTYRVVSVLTVLHQDWLNGKEYKCQVSNKALPAPIEKTISKAKGQPREPQVYTLPPCRDELTKNQVSLWCLVKGFYPSDIAVEWESNGQPENNYKTTPPVLDSDGSFFLYSKLTVDKSRWQQGNVFSCSVMHEALHNHYTQKSLSLSPGKGGSGGSGGSGGSGGSGGSGGSGGSGGSGGSGGSGGSGGSGGSGGSGGSGGSGGSGGSGGSAPTSSSTKKTQLQLEHLLLDLQMILNGINNYKNPKLTRMLTFKFYMPKKATELKHLQCLEEELKPLEEVLNLAQSKNFHLRPRDLISNIFVIVLELKGSETTFMCEYADETATIVEFLNRWITFAQSIISTLT

SEQ ID NO: 319 - protein, 439 aa, Artificial Sequence
  Synthetic polymer.
MKLPVRLLVLMFWIPASSSDKTHTCPPCPAPEAAGGPSVFLFPPKPKDTLMISRTPEVTCVVVDVSHEDPEVKFNWYVDGVEVHNAKTKPREEQYNSTYRVVSVLTVLHQDWLNGKEYKCQVSNKALPAPIEKTISKAKGQPREPQVYTLPPCRDELTKNQVSLWCLVKGFYPSDIAVEWESNGQPENNYKTTPPVLDSDGSFFLYSKLTVDKSRWQQGNVFSCSVMHEALHNHYTQKSLSLSPGKGGSGGSGGSGGSGGSGGSGGSGGSGGSGGSGGSGGSGGSGGSGGSGGSGGSGGSGGSGGSAPTSSSTKKTQLQLEHLLLDLQMILNGINNYKNPKLTRMLTFKFYMPKKATELKHLQCLEEELKPLEEVLNLAQSKNFHLRPRDLISNIGVIVLELKGSETTFMCEYADETATIVEFLNRWITFAQSIISTLT

SEQ ID NO: 320 - protein, 439 aa, Artificial Sequence
  Synthetic polymer.
MKLPVRLLVLMFWIPASSSDKTHTCPPCPAPEAAGGPSVFLFPPKPKDTLMISRTPEVTCVVVDVSHEDPEVKFNWYVDGVEVHNAKTKPREEQYNSTYRVVSVLTVLHQDWLNGKEYKCQVSNKALPAPIEKTISKAKGQPREPQVYTLPPCRDELTKNQVSLWCLVKGFYPSDIAVEWESNGQPENNYKTTPPVLDSDGSFFLYSKLTVDKSRWQQGNVFSCSVMHEALHNHYTQKSLSLSPGKGGSGGSGGSGGSGGSGGSGGSGGSGGSGGSGGSGGSGGSGGSGGSGGSGGSGGSGGSGGSAPTSSSTKKTQLQLEHLLLDLQMILNGINNYKNPKLTRMLTFKFYMPKKATELKHLQCLEEELKPLEEVLNLAQSKNFHLRPRDLISNIHVIVLELKGSETTFMCEYADETATIVEFLNRWITFAQSIISTLT

SEQ ID NO: 321 - protein, 439 aa, Artificial Sequence
  Synthetic polymer.
MKLPVRLLVLMFWIPASSSDKTHTCPPCPAPEAAGGPSVFLFPPKPKDTLMISRTPEVTCVVVDVSHEDPEVKFNWYVDGVEVHNAKTKPREEQYNSTYRVVSVLTVLHQDWLNGKEYKCQVSNKALPAPIEKTISKAKGQPREPQVYTLPPCRDELTKNQVSLWCLVKGFYPSDIAVEWESNGQPENNYKTTPPVLDSDGSFFLYSKLTVDKSRWQQGNVFSCSVMHEALHNHYTQKSLSLSPGKGGSGGSGGSGGSGGSGGSGGSGGSGGSGGSGGSGGSGGSGGSGGSGGSGGSGGSGGSGGSAPTSSSTKKTQLQLEHLLLDLQMILNGINNYKNPKLTRMLTFKFYMPKKATELKHLQCLEEELKPLEEVLNLAQSKNFHLRPRDLISNIIVIVLELKGSETTFMCEYADETATIVEFLNRWITFAQSIISTLT

SEQ ID NO: 322 - protein, 439 aa, Artificial Sequence
  Synthetic polymer.
MKLPVRLLVLMFWIPASSSDKTHTCPPCPAPEAAGGPSVFLFPPKPKDTLMISRTPEVTCVVVDVSHEDPEVKFNWYVDGVEVHNAKTKPREEQYNSTYRVVSVLTVLHQDWLNGKEYKCQVSNKALPAPIEKTISKAKGQPREPQVYTLPPCRDELTKNQVSLWCLVKGFYPSDIAVEWESNGQPENNYKTTPPVLDSDGSFFLYSKLTVDKSRWQQGNVFSCSVMHEALHNHYTQKSLSLSPGKGGSGGSGGSGGSGGSGGSGGSGGSGGSGGSGGSGGSGGSGGSGGSGGSGGSGGSGGSGGSAPTSSSTKKTQLQLEHLLLDLQMILNGINNYKNPKLTRMLTFKFYMPKKATELKHLQCLEEELKPLEEVLNLAQSKNFHLRPRDLISNIKVIVLELKGSETTFMCEYADETATIVEFLNRWITFAQSIISTLT

SEQ ID NO: 323 - protein, 439 aa, Artificial Sequence
  Synthetic polymer.
MKLPVRLLVLMFWIPASSSDKTHTCPPCPAPEAAGGPSVFLFPPKPKDTLMISRTPEVTCVVVDVSHEDPEVKFNWYVDGVEVHNAKTKPREEQYNSTYRVVSVLTVLHQDWLNGKEYKCQVSNKALPAPIEKTISKAKGQPREPQVYTLPPCRDELTKNQVSLWCLVKGFYPSDIAVEWESNGQPENNYKTTPPVLDSDGSFFLYSKLTVDKSRWQQGNVFSCSVMHEALHNHYTQKSLSLSPGKGGSGGSGGSGGSGGSGGSGGSGGSGGSGGSGGSGGSGGSGGSGGSGGSGGSGGSGGSGGSAPTSSSTKKTQLQLEHLLLDLQMILNGINNYKNPKLTRMLTFKFYMPKKATELKHLQCLEEELKPLEEVLNLAQSKNFHLRPRDLISNILVIVLELKGSETTFMCEYADETATIVEFLNRWITFAQSIISTLT

SEQ ID NO: 324 - protein, 439 aa, Artificial Sequence
  Synthetic polymer.
MKLPVRLLVLMFWIPASSSDKTHTCPPCPAPEAAGGPSVFLFPPKPKDTLMISRTPEVTCVVVDVSHEDPEVKFNWYVDGVEVHNAKTKPREEQYNSTYRVVSVLTVLHQDWLNGKEYKCQVSNKALPAPIEKTISKAKGQPREPQVYTLPPCRDELTKNQVSLWCLVKGFYPSDIAVEWESNGQPENNYKTTPPVLDSDGSFFLYSKLTVDKSRWQQGNVFSCSVMHEALHNHYTQKSLSLSPGKGGSGGSGGSGGSGGSGGSGGSGGSGGSGGSGGSGGSGGSGGSGGSGGSGGSGGSGGSGGSAPTSSSTKKTQLQLEHLLLDLQMILNGINNYKNPKLTRMLTFKFYMPKKATELKHLQCLEEELKPLEEVLNLAQSKNFHLRPRDLISNIPVIVLELKGSETTFMCEYADETATIVEFLNRWITFAQSIISTLT

SEQ ID NO: 325 - protein, 439 aa, Artificial Sequence
  Synthetic polymer.
MKLPVRLLVLMFWIPASSSDKTHTCPPCPAPEAAGGPSVFLFPPKPKDTLMISRTPEVTCVVVDVSHEDPEVKFNWYVDGVEVHNAKTKPREEQYNSTYRVVSVLTVLHQDWLNGKEYKCQVSNKALPAPIEKTISKAKGQPREPQVYTLPPCRDELTKNQVSLWCLVKGFYPSDIAVEWESNGQPENNYKTTPPVLDSDGSFFLYSKLTVDKSRWQQGNVFSCSVMHEALHNHYTQKSLSLSPGKGGSGGSGGSGGSGGSGGSGGSGGSGGSGGSGGSGGSGGSGGSGGSGGSGGSGGSGGSGGSAPTSSSTKKTQLQLEHLLLDLQMILNGINNYKNPKLTRMLTFKFYMPKKATELKHLQCLEEELKPLEEVLNLAQSKNFHLRPRDLISNIQVIVLELKGSETTFMCEYADETATIVEFLNRWITFAQSIISTLT

SEQ ID NO: 326 - protein, 439 aa, Artificial Sequence
  Synthetic polymer.
MKLPVRLLVLMFWIPASSSDKTHTCPPCPAPEAAGGPSVFLFPPKPKDTLMISRTPEVTCVVVDVSHEDPEVKFNWYVDGVEVHNAKTKPREEQYNSTYRVVSVLTVLHQDWLNGKEYKCQVSNKALPAPIEKTISKAKGQPREPQVYTLPPCRDELTKNQVSLWCLVKGFYPSDIAVEWESNGQPENNYKTTPPVLDSDGSFFLYSKLTVDKSRWQQGNVFSCSVMHEALHNHYTQKSLSLSPGKGGSGGSGGSGGSGGSGGSGGSGGSGGSGGSGGSGGSGGSGGSGGSGGSGGSGGSGGSGGSAPTSSSTKKTQLQLEHLLLDLQMILNGINNYKNPKLTRMLTFKFYMPKKATELKHLQCLEEELKPLEEVLNLAQSKNFHLRPRDLISNIRVIVLELKGSETTFMCEYADETATIVEFLNRWITFAQSIISTLT

SEQ ID NO: 327 - protein, 439 aa, Artificial Sequence
  Synthetic polymer.
MKLPVRLLVLMFWIPASSSDKTHTCPPCPAPEAAGGPSVFLFPPKPKDTLMISRTPEVTCVVVDVSHEDPEVKFNWYVDGVEVHNAKTKPREEQYNSTYRVVSVLTVLHQDWLNGKEYKCQVSNKALPAPIEKTISKAKGQPREPQVYTLPPCRDELTKNQVSLWCLVKGFYPSDIAVEWESNGQPENNYKTTPPVLDSDGSFFLYSKLTVDKSRWQQGNVFSCSVMHEALHNHYTQKSLSLSPGKGGSGGSGGSGGSGGSGGSGGSGGSGGSGGSGGSGGSGGSGGSGGSGGSGGSGGSGGSGGSAPTSSSTKKTQLQLEHLLLDLQMILNGINNYKNPKLTRMLTFKFYMPKKATELKHLQCLEEELKPLEEVLNLAQSKNFHLRPRDLISNISVIVLELKGSETTFMCEYADETATIVEFLNRWITFAQSIISTLT

SEQ ID NO: 328 - protein, 439 aa, Artificial Sequence
  Synthetic polymer.
MKLPVRLLVLMFWIPASSSDKTHTCPPCPAPEAAGGPSVFLFPPKPKDTLMISRTPEVTCVVVDVSHEDPEVKFNWYVDGVEVHNAKTKPREEQYNSTYRVVSVLTVLHQDWLNGKEYKCQVSNKALPAPIEKTISKAKGQPREPQVYTLPPCRDELTKNQVSLWCLVKGFYPSDIAVEWESNGQPENNYKTTPPVLDSDGSFFLYSKLTVDKSRWQQGNVFSCSVMHEALHNHYTQKSLSLSPGKGGSGGSGGSGGSGGSGGSGGSGGSGGSGGSGGSGGSGGSGGSGGSGGSGGSGGSGGSGGSAPTSSSTKKTQLQLEHLLLDLQMILNGINNYKNPKLTRMLTFKFYMPKKATELKHLQCLEEELKPLEEVLNLAQSKNFHLRPRDLISNITVIVLELKGSETTFMCEYADETATIVEFLNRWITFAQSIISTLT

SEQ ID NO: 329 - protein, 439 aa, Artificial Sequence
  Synthetic polymer.
MKLPVRLLVLMFWIPASSSDKTHTCPPCPAPEAAGGPSVFLFPPKPKDTLMISRTPEVTCVVVDVSHEDPEVKFNWYVDGVEVHNAKTKPREEQYNSTYRVVSVLTVLHQDWLNGKEYKCQVSNKALPAPIEKTISKAKGQPREPQVYTLPPCRDELTKNQVSLWCLVKGFYPSDIAVEWESNGQPENNYKTTPPVLDSDGSFFLYSKLTVDKSRWQQGNVFSCSVMHEALHNHYTQKSLSLSPGKGGSGGSGGSGGSGGSGGSGGSGGSGGSGGSGGSGGSGGSGGSGGSGGSGGSGGSGGSGGSAPTSSSTKKTQLQLEHLLLDLQMILNGINNYKNPKLTRMLTFKFYMPKKATELKHLQCLEEELKPLEEVLNLAQSKNFHLRPRDLISNIVVIVLELKGSETTFMCEYADETATIVEFLNRWITFAQSIISTLT

SEQ ID NO: 330 - protein, 439 aa, Artificial Sequence
  Synthetic polymer.
MKLPVRLLVLMFWIPASSSDKTHTCPPCPAPEAAGGPSVFLFPPKPKDTLMISRTPEVTCVVVDVSHEDPEVKFNWYVDGVEVHNAKTKPREEQYNSTYRVVSVLTVLHQDWLNGKEYKCQVSNKALPAPIEKTISKAKGQPREPQVYTLPPCRDELTKNQVSLWCLVKGFYPSDIAVEWESNGQPENNYKTTPPVLDSDGSFFLYSKLTVDKSRWQQGNVFSCSVMHEALHNHYTQKSLSLSPGKGGSGGSGGSGGSGGSGGSGGSGGSGGSGGSGGSGGSGGSGGSGGSGGSGGSGGSGGSGGSAPTSSSTKKTQLQLEHLLLDLQMILNGINNYKNPKLTRMLTFKFYMPKKATELKHLQCLEEELKPLEEVLNLAQSKNFHLRPRDLISNIWVIVLELKGSETTFMCEYADETATIVEFLNRWITFAQSIISTLT

SEQ ID NO: 331 - protein, 439 aa, Artificial Sequence
  Synthetic polymer.
MKLPVRLLVLMFWIPASSSDKTHTCPPCPAPEAAGGPSVFLFPPKPKDTLMISRTPEVTCVVVDVSHEDPEVKFNWYVDGVEVHNAKTKPREEQYNSTYRVVSVLTVLHQDWLNGKEYKCQVSNKALPAPIEKTISKAKGQPREPQVYTLPPCRDELTKNQVSLWCLVKGFYPSDIAVEWESNGQPENNYKTTPPVLDSDGSFFLYSKLTVDKSRWQQGNVFSCSVMHEALHNHYTQKSLSLSPGKGGSGGSGGSGGSGGSGGSGGSGGSGGSGGSGGSGGSGGSGGSGGSGGSGGSGGSGGSGGSAPTSSSTKKTQLQLEHLLLDLQMILNGINNYKNPKLTRMLTFKFYMPKKATELKHLQCLEEELKPLEEVLNLAQSKNFHLRPRDLISNIYVIVLELKGSETTFMCEYADETATIVEFLNRWITFAQSIISTLT

SEQ ID NO: 332 - protein, 439 aa, Artificial Sequence
  Synthetic polymer.
MKLPVRLLVLMFWIPASSSDKTHTCPPCPAPEAAGGPSVFLFPPKPKDTLMISRTPEVTCVVVDVSHEDPEVKFNWYVDGVEVHNAKTKPREEQYNSTYRVVSVLTVLHQDWLNGKEYKCQVSNKALPAPIEKTISKAKGQPREPQVYTLPPCRDELTKNQVSLWCLVKGFYPSDIAVEWESNGQPENNYKTTPPVLDSDGSFFLYSKLTVDKSRWQQGNVFSCSVMHEALHNHYTQKSLSLSPGKGGSGGSGGSGGSGGSGGSGGSGGSGGSGGSGGSGGSGGSGGSGGSGGSGGSGGSGGSGGSAPTSSSTKKTQLQLEHLLLELQMILNGINNYKNPKLTAMLTKKFYMPKKATELKHLQCLEEELKPLEEVLNGAQSKNFHLRPRDLISNINVIVLELKGSETTFMCEYADETATIVEFLNRWITFAQSIISTLT

SEQ ID NO: 333 - protein, 439 aa, Artificial Sequence
  Synthetic polymer.
MKLPVRLLVLMFWIPASSSDKTHTCPPCPAPEAAGGPSVFLFPPKPKDTLMISRTPEVTCVVVDVSHEDPEVKFNWYVDGVEVHNAKTKPREEQYNSTYRVVSVLTVLHQDWLNGKEYKCQVSNKALPAPIEKTISKAKGQPREPQVYTLPPCRDELTKNQVSLWCLVKGFYPSDIAVEWESNGQPENNYKTTPPVLDSDGSFFLYSKLTVDKSRWQQGNVFSCSVMHEALHNHYTQKSLSLSPGKGGSGGSGGSGGSGGSGGSGGSGGSGGSGGSGGSGGSGGSGGSGGSGGSGGSGGSGGSGGSAPTSSSTKKTQLQLEHLLLVLQMILNGINNYKNPKLTAMLTKKFYMPKKATELKHLQCLEEELKPLEEVLNGAQSKNFHLRPRDLISNINVIVLELKGSETTFMCEYADETATIVEFLNRWITFAQSIISTLT

SEQ ID NO: 334 - protein, 439 aa, Artificial Sequence
  Synthetic polymer.
MKLPVRLLVLMFWIPASSSDKTHTCPPCPAPEAAGGPSVFLFPPKPKDTLMISRTPEVTCVVVDVSHEDPEVKFNWYVDGVEVHNAKTKPREEQYNSTYRVVSVLTVLHQDWLNGKEYKCQVSNKALPAPIEKTISKAKGQPREPQVYTLPPCRDELTKNQVSLWCLVKGFYPSDIAVEWESNGQPENNYKTTPPVLDSDGSFFLYSKLTVDKSRWQQGNVFSCSVMHEALHNHYTQKSLSLSPGKGGSGGSGGSGGSGGSGGSGGSGGSGGSGGSGGSGGSGGSGGSGGSGGSGGSGGSGGSGGSAPTSSSTKKTQLQLEHLLLDLQMILNGINNYKNPKLTAMLTKKFYMPKKATELKHLQCLEEELKPLEEVLNGAQSKNFHLRPRDLISNIAVIVLELKGSETTFMCEYADETATIVEFLNRWITFAQSIISTLT

SEQ ID NO: 335 - protein, 439 aa, Artificial Sequence
  Synthetic polymer.
MKLPVRLLVLMFWIPASSSDKTHTCPPCPAPEAAGGPSVFLFPPKPKDTLMISRTPEVTCVVVDVSHEDPEVKFNWYVDGVEVHNAKTKPREEQYNSTYRVVSVLTVLHQDWLNGKEYKCQVSNKALPAPIEKTISKAKGQPREPQVYTLPPCRDELTKNQVSLWCLVKGFYPSDIAVEWESNGQPENNYKTTPPVLDSDGSFFLYSKLTVDKSRWQQGNVFSCSVMHEALHNHYTQKSLSLSPGKGGSGGSGGSGGSGGSGGSGGSGGSGGSGGSGGSGGSGGSGGSGGSGGSGGSGGSGGSGGSAPTSSSTKKTQLQLEHLLLDLQMILNGINNYKNPKLTAMLTKKFYMPKKATELKHLQCLEEELKPLEEVLNGAQSKNFHLRPRDLISNIGVIVLELKGSETTFMCEYADETATIVEFLNRWITFAQSIISTLT

SEQ ID NO: 336 - protein, 546 aa, Artificial Sequence
  Synthetic polymer.
MEFGLSWLFLVAILKGVQCQVQLKESGPGLVAPSQSLSITCTVSGFSLTSYGIQWVRQPPGKGLEWLGVIWAGGSTNYNSALMSRLSISKDNSKSQVFLKMNSLQTDDTAMYYCARAYGYDGSWLAYWGQGTLVTVSSGGGGSGGGGSGGGGSQIVLSQSPAILSASPGEKVTMTCRASSSVSYMHWYQQKPGSSPKPWIFATSNLASGVPARFSGSGSGTSYSLTINRVEAEDADTYYCQQWSSNPPTFGGGTKLEIKGGSGGSGGSGGSGGSGGSGGSGGSGGSGGSGGSGGSGGSGGSGGSGGSGGSGGSGGSGGSDKTHTCPPCPAPEAAGGPSVFLFPPKPKDTLMISRTPEVTCVVVDVSHEDPEVKFNWYVDGVEVHNAKTKPREEQYNSTYRVVSVLTVLHQDWLNGKEYKCQVSNKALPAPIEKTISKAKGQPREPQVCTLPPSRDELTKNQVSLSCAVKGFYPSDIAVEWESNGQPENNYKTTPPVLDSDGSFFLVSKLTVDKSRWQQGNVFSCSVMHEALHNHYTQKSLSLSPGK

SEQ ID NO: 337 - protein, 546 aa, Artificial Sequence
  Synthetic polymer.
MEFGLSWLFLVAILKGVQCQIVLSQSPAILSASPGEKVTMTCRASSSVSYMHWYQQKPGSSPKPWIFATSNLASGVPARFSGSGSGTSYSLTINRVEAEDADTYYCQQWSSNPPTFGGGTKLEIKGGGGSGGGGSGGGGSQVQLKESGPGLVAPSQSLSITCTVSGFSLTSYGIQWVRQPPGKGLEWLGVIWAGGSTNYNSALMSRLSISKDNSKSQVFLKMNSLQTDDTAMYYCARAYGYDGSWLAYWGQGTLVTVSSGGSGGSGGSGGSGGSGGSGGSGGSGGSGGSGGSGGSGGSGGSGGSGGSGGSGGSGGSGGSDKTHTCPPCPAPEAAGGPSVFLFPPKPKDTLMISRTPEVTCVVVDVSHEDPEVKFNWYVDGVEVHNAKTKPREEQYNSTYRVVSVLTVLHQDWLNGKEYKCQVSNKALPAPIEKTISKAKGQPREPQVCTLPPSRDELTKNQVSLSCAVKGFYPSDIAVEWESNGQPENNYKTTPPVLDSDGSFFLVSKLTVDKSRWQQGNVFSCSVMHEALHNHYTQKSLSLSPGK

SEQ ID NO: 338 - protein, 550 aa, Artificial Sequence
  Synthetic polymer.
MEFGLSWLFLVAILKGVQCEVQLVESGGDLVQPRGSLKLSCAASGFTFSSYGMSWVRQTPDKRLELVATINGYGDTTYYPDSVKGRFTISRDNAKNTLYLQMSSLKSEDTAMYFCARDRDYGNSYYYALDYWGQGTSVTVSSGGGGSGGGGSGGGGSQIVLSQSPAILSASPGERVTMTCRASSSVSFMHWLQQKPGSSPKPWIYATSNLASGVSARFSGSGSGTSYSLTITRVEAEDAATYYCQQWSSNPPAFGGGTKLEIKGGSGGSGGSGGSGGSGGSGGSGGSGGSGGSGGSGGSGGSGGSGGSGGSGGSGGSGGSGGSDKTHTCPPCPAPEAAGGPSVFLFPPKPKDTLMISRTPEVTCVVVDVSHEDPEVKFNWYVDGVEVHNAKTKPREEQYNSTYRVVSVLTVLHQDWLNGKEYKCQVSNKALPAPIEKTISKAKGQPREPQVCTLPPSRDELTKNQVSLSCAVKGFYPSDIAVEWESNGQPENNYKTTPPVLDSDGSFFLVSKLTVDKSRWQQGNVFSCSVMHEALHNHYTQKSLSLSPGK

SEQ ID NO: 339 - protein, 550 aa, Artificial Sequence
  Synthetic polymer.
MEFGLSWLFLVAILKGVQCQIVLSQSPAILSASPGERVTMTCRASSSVSFMHWLQQKPGSSPKPWIYATSNLASGVSARFSGSGSGTSYSLTITRVEAEDAATYYCQQWSSNPPAFGGGTKLEIKGGGGSGGGGSGGGGSEVQLVESGGDLVQPRGSLKLSCAASGFTFSSYGMSWVRQTPDKRLELVATINGYGDTTYYPDSVKGRFTISRDNAKNTLYLQMSSLKSEDTAMYFCARDRDYGNSYYYALDYWGQGTSVTVSSGGSGGSGGSGGSGGSGGSGGSGGSGGSGGSGGSGGSGGSGGSGGSGGSGGSGGSGGSGGSDKTHTCPPCPAPEAAGGPSVFLFPPKPKDTLMISRTPEVTCVVVDVSHEDPEVKFNWYVDGVEVHNAKTKPREEQYNSTYRVVSVLTVLHQDWLNGKEYKCQVSNKALPAPIEKTISKAKGQPREPQVCTLPPSRDELTKNQVSLSCAVKGFYPSDIAVEWESNGQPENNYKTTPPVLDSDGSFFLVSKLTVDKSRWQQGNVFSCSVMHEALHNHYTQKSLSLSPGK

SEQ ID NO: 340 - protein, 406 aa, Artificial Sequence
  Synthetic polymer.
MKLPVRLLVLMFWIPASSSDKTHTCPPCPAPEAAGGPSVFLFPPKPKDTLMISRTPEVTCVVVDVSHEDPEVKFNWYVDGVEVHNAKTKPREEQYNSTYRVVSVLTVLHQDWLNGKEYKCQVSNKALPAPIEKTISKAKGQPREPQVYTLPPCRDELTKNQVSLWCLVKGFYPSDIAVEWESNGQPENNYKTTPPVLDSDGSFFLYSKLTVDKSRWQQGNVFSCSVMHEALHNHYTQKSLSLSPGKGGSGGSGGSGGSGGSGGSGGSGGSGGSGGSGGSGGSGGSGGSGGSGGSGGSGGSGGSGGSPKKKIQLHAEHALYDALMILNIVKTNSPPAEEKLEDYAFNFELILEEIARLFESGDQKDEAEKAKRMKEWMKRIKTTASEDEQEEMANAIITILQSWIFS

SEQ ID NO: 341 - protein, 406 aa, Artificial Sequence
  Synthetic polymer.
MKLPVRLLVLMFWIPASSSDKTHTCPPCPAPEAAGGPSVFLFPPKPKDTLMISRTPEVTCVVVDVSHEDPEVKFNWYVDGVEVHNAKTKPREEQYNSTYRVVSVLTVLHQDWLNGKEYKCQVSNKALPAPIEKTISKAKGQPREPQVYTLPPCRDELTKNQVSLWCLVKGFYPSDIAVEWESNGQPENNYKTTPPVLDSDGSFFLYSKLTVDKSRWQQGNVFSCSVMHEALHNHYTQKSLSLSPGKGGSGGSGGSGGSGGSGGSGGSGGSGGSGGSGGSGGSGGSGGSGGSGGSGGSGGSGGSGGSPKKKIQLHAEHALYTALMILNIVKTNSPPAEEKLEDYAFNFELILEEIARLFESGDQKDEAEKAKRMKEWMKRIKTTASEDEQEEMANAIITILQSWIFS

SEQ ID NO: 342 - protein, 406 aa, Artificial Sequence
  Synthetic polymer.
MKLPVRLLVLMFWIPASSSDKTHTCPPCPAPEAAGGPSVFLFPPKPKDTLMISRTPEVTCVVVDVSHEDPEVKFNWYVDGVEVHNAKTKPREEQYNSTYRVVSVLTVLHQDWLNGKEYKCQVSNKALPAPIEKTISKAKGQPREPQVYTLPPCRDELTKNQVSLWCLVKGFYPSDIAVEWESNGQPENNYKTTPPVLDSDGSFFLYSKLTVDKSRWQQGNVFSCSVMHEALHNHYTQKSLSLSPGKGGSGGSGGSGGSGGSGGSGGSGGSGGSGGSGGSGGSGGSGGSGGSGGSGGSGGSGGSGGSPKKKIQLHAEHALYHALMILNIVKTNSPPAEEKLEDYAFNFELILEEIARLFESGDQKDEAEKAKRMKEWMKRIKTTASEDEQEEMANAIITILQSWIFS

SEQ ID NO: 343 - protein, 406 aa, Artificial Sequence
  Synthetic polymer.
MKLPVRLLVLMFWIPASSSDKTHTCPPCPAPEAAGGPSVFLFPPKPKDTLMISRTPEVTCVVVDVSHEDPEVKFNWYVDGVEVHNAKTKPREEQYNSTYRVVSVLTVLHQDWLNGKEYKCQVSNKALPAPIEKTISKAKGQPREPQVYTLPPCRDELTKNQVSLWCLVKGFYPSDIAVEWESNGQPENNYKTTPPVLDSDGSFFLYSKLTVDKSRWQQGNVFSCSVMHEALHNHYTQKSLSLSPGKGGSGGSGGSGGSGGSGGSGGSGGSGGSGGSGGSGGSGGSGGSGGSGGSGGSGGSGGSGGSPKKKIQLHAEHALYDALMILNIVKTNSPPAEEKLEDYAFIFELILEEIARLFESGDQKDEAEKAKRMKEWMKRIKTTASEDEQEEMANAIITILQSWIFS

SEQ ID NO: 344 - protein, 406 aa, Artificial Sequence
  Synthetic polymer.
MKLPVRLLVLMFWIPASSSDKTHTCPPCPAPEAAGGPSVFLFPPKPKDTLMISRTPEVTCVVVDVSHEDPEVKFNWYVDGVEVHNAKTKPREEQYNSTYRVVSVLTVLHQDWLNGKEYKCQVSNKALPAPIEKTISKAKGQPREPQVYTLPPCRDELTKNQVSLWCLVKGFYPSDIAVEWESNGQPENNYKTTPPVLDSDGSFFLYSKLTVDKSRWQQGNVFSCSVMHEALHNHYTQKSLSLSPGKGGSGGSGGSGGSGGSGGSGGSGGSGGSGGSGGSGGSGGSGGSGGSGGSGGSGGSGGSGGSPKKKIQLHAEHALYDALMILNIVKTNSPPAEEKLEDYAFGFELILEEIARLFESGDQKDEAEKAKRMKEWMKRIKTTASEDEQEEMANAIITILQSWIFS

SEQ ID NO: 345 - protein, 406 aa, Artificial Sequence
  Synthetic polymer.
MKLPVRLLVLMFWIPASSSDKTHTCPPCPAPEAAGGPSVFLFPPKPKDTLMISRTPEVTCVVVDVSHEDPEVKFNWYVDGVEVHNAKTKPREEQYNSTYRVVSVLTVLHQDWLNGKEYKCQVSNKALPAPIEKTISKAKGQPREPQVYTLPPCRDELTKNQVSLWCLVKGFYPSDIAVEWESNGQPENNYKTTPPVLDSDGSFFLYSKLTVDKSRWQQGNVFSCSVMHEALHNHYTQKSLSLSPGKGGSGGSGGSGGSGGSGGSGGSGGSGGSGGSGGSGGSGGSGGSGGSGGSGGSGGSGGSGGSPKKKIQLHAEHALYDALMILNIVKTNSPPAEEKLEDYAFRFELILEEIARLFESGDQKDEAEKAKRMKEWMKRIKTTASEDEQEEMANAIITILQSWIFS

SEQ ID NO: 346 - protein, 426 aa, Artificial Sequence; identical to SEQ ID NO: 297
  Synthetic polymer.

SEQ ID NO: 347 - protein, 439 aa, Artificial Sequence
  Synthetic polymer.
MKLPVRLLVLMFWIPASSSDKTHTCPPCPAPEAAGGPSVFLFPPKPKDTLMISRTPEVTCVVVDVSHEDPEVKFNWYVDGVEVHNAKTKPREEQYNSTYRVVSVLTVLHQDWLNGKEYKCQVSNKALPAPIEKTISKAKGQPREPQVYTLPPCRDELTKNQVSLWCLVKGFYPSDIAVEWESNGQPENNYKTTPPVLDSDGSFFLYSKLTVDKSRWQQGNVFSCSVMHEALHNHYTQKSLSLSPGKGGSGGSGGSGGSGGSGGSGGSGGSGGSGGSGGSGGSGGSGGSGGSGGSGGSGGSGGSGGSAPTSSSTKKTQLQLEHLLLDLQMILNGINNYKNPKLTAMLTKKFAMPKKATELKHLQCLEEELKPLEEVLNGAQSKNFHLRPRDLISGINVIVLELKGSETTFMCEYADETATIVEFLNRWITFAQSIISTLT

SEQ ID NO: 348 - protein, 439 aa, Artificial Sequence
  Synthetic polymer.
MKLPVRLLVLMFWIPASSSDKTHTCPPCPAPEAAGGPSVFLFPPKPKDTLMISRTPEVTCVVVDVSHEDPEVKFNWYVDGVEVHNAKTKPREEQYNSTYRVVSVLTVLHQDWLNGKEYKCQVSNKALPAPIEKTISKAKGQPREPQVYTLPPCRDELTKNQVSLWCLVKGFYPSDIAVEWESNGQPENNYKTTPPVLDSDGSFFLYSKLTVDKSRWQQGNVFSCSVMHEALHNHYTQKSLSLSPGKGGSGGSGGSGGSGGSGGSGGSGGSGGSGGSGGSGGSGGSGGSGGSGGSGGSGGSGGSGGSAPASSSTKKTQLQLEHLLLDLQMILNGINNYKNPKLTAMLTKKFAMPKKATELKHLQCLEEELKPLEEVLNGAQSKNFHLRPRDLISGINVIVLELKGSETTFMCEYADETATIVEFLNRWITFAQSIISTLT

SEQ ID NO: 349 - protein, 439 aa, Artificial Sequence
  Synthetic polymer.
MKLPVRLLVLMFWIPASSSDKTHTCPPCPAPEAAGGPSVFLFPPKPKDTLMISRTPEVTCVVVDVSHEDPEVKFNWYVDGVEVHNAKTKPREEQYNSTYRVVSVLTVLHQDWLNGKEYKCQVSNKALPAPIEKTISKAKGQPREPQVYTLPPCRDELTKNQVSLWCLVKGFYPSDIAVEWESNGQPENNYKTTPPVLDSDGSFFLYSKLTVDKSRWQQGNVFSCSVMHEALHNHYTQKSLSLSPGKGGSGGSGGSGGSGGSGGSGGSGGSGGSGGSGGSGGSGGSGGSGGSGGSGGSGGSGGSGGSAPFSSSTKKTQLQLEHLLLDLQMILNGINNYKNPKLTAMLTKKFAMPKKATELKHLQCLEEELKPLEEVLNGAQSKNFHLRPRDLISGINVIVLELKGSETTFMCEYADETATIVEFLNRWITFAQSIISTLT

SEQ ID NO: 350 - protein, 439 aa, Artificial Sequence
  Synthetic polymer.
MKLPVRLLVLMFWIPASSSDKTHTCPPCPAPEAAGGPSVFLFPPKPKDTLMISRTPEVTCVVVDVSHEDPEVKFNWYVDGVEVHNAKTKPREEQYNSTYRVVSVLTVLHQDWLNGKEYKCQVSNKALPAPIEKTISKAKGQPREPQVYTLPPCRDELTKNQVSLWCLVKGFYPSDIAVEWESNGQPENNYKTTPPVLDSDGSFFLYSKLTVDKSRWQQGNVFSCSVMHEALHNHYTQKSLSLSPGKGGSGGSGGSGGSGGSGGSGGSGGSGGSGGSGGSGGSGGSGGSGGSGGSGGSGGSGGSGGSAPHSSSTKKTQLQLEHLLLDLQMILNGINNYKNPKLTAMLTKKFAMPKKATELKHLQCLEEELKPLEEVLNGAQSKNFHLRPRDLISGINVIVLELKGSETTFMCEYADETATIVEFLNRWITFAQSIISTLT

SEQ ID NO: 351 - protein, 439 aa, Artificial Sequence
  Synthetic polymer.
MKLPVRLLVLMFWIPASSSDKTHTCPPCPAPEAAGGPSVFLFPPKPKDTLMISRTPEVTCVVVDVSHEDPEVKFNWYVDGVEVHNAKTKPREEQYNSTYRVVSVLTVLHQDWLNGKEYKCQVSNKALPAPIEKTISKAKGQPREPQVYTLPPCRDELTKNQVSLWCLVKGFYPSDIAVEWESNGQPENNYKTTPPVLDSDGSFFLYSKLTVDKSRWQQGNVFSCSVMHEALHNHYTQKSLSLSPGKGGSGGSGGSGGSGGSGGSGGSGGSGGSGGSGGSGGSGGSGGSGGSGGSGGSGGSGGSGGSAPLSSSTKKTQLQLEHLLLDLQMILNGINNYKNPKLTAMLTKKFAMPKKATELKHLQCLEEELKPLEEVLNGAQSKNFHLRPRDLISGINVIVLELKGSETTFMCEYADETATIVEFLNRWITFAQSIISTLT

SEQ ID NO: 352 - protein, 439 aa, Artificial Sequence
  Synthetic polymer.
MKLPVRLLVLMFWIPASSSDKTHTCPPCPAPEAAGGPSVFLFPPKPKDTLMISRTPEVTCVVVDVSHEDPEVKFNWYVDGVEVHNAKTKPREEQYNSTYRVVSVLTVLHQDWLNGKEYKCQVSNKALPAPIEKTISKAKGQPREPQVYTLPPCRDELTKNQVSLWCLVKGFYPSDIAVEWESNGQPENNYKTTPPVLDSDGSFFLYSKLTVDKSRWQQGNVFSCSVMHEALHNHYTQKSLSLSPGKGGSGGSGGSGGSGGSGGSGGSGGSGGSGGSGGSGGSGGSGGSGGSGGSGGSGGSGGSGGSAPVSSSTKKTQLQLEHLLLDLQMILNGINNYKNPKLTAMLTKKFAMPKKATELKHLQCLEEELKPLEEVLNGAQSKNFHLRPRDLISGINVIVLELKGSETTFMCEYADETATIVEFLNRWITFAQSIISTLT

SEQ ID NO: 353 - protein, 439 aa, Artificial Sequence
  Synthetic polymer.
MKLPVRLLVLMFWIPASSSDKTHTCPPCPAPEAAGGPSVFLFPPKPKDTLMISRTPEVTCVVVDVSHEDPEVKFNWYVDGVEVHNAKTKPREEQYNSTYRVVSVLTVLHQDWLNGKEYKCQVSNKALPAPIEKTISKAKGQPREPQVYTLPPCRDELTKNQVSLWCLVKGFYPSDIAVEWESNGQPENNYKTTPPVLDSDGSFFLYSKLTVDKSRWQQGNVFSCSVMHEALHNHYTQKSLSLSPGKGGSGGSGGSGGSGGSGGSGGSGGSGGSGGSGGSGGSGGSGGSGGSGGSGGSGGSGGSGGSAPYSSSTKKTQLQLEHLLLDLQMILNGINNYKNPKLTAMLTKKFAMPKKATELKHLQCLEEELKPLEEVLNGAQSKNFHLRPRDLISGINVIVLELKGSETTFMCEYADETATIVEFLNRWITFAQSIISTLT

SEQ ID NO: 354 - protein, 436 aa, Artificial Sequence
  Synthetic polymer.
MKLPVRLLVLMFWIPASSSDKTHTCPPCPAPEAAGGPSVFLFPPKPKDTLMISRTPEVTCVVVDVSHEDPEVKFNWYVDGVEVHNAKTKPREEQYNSTYRVVSVLTVLHQDWLNGKEYKCQVSNKALPAPIEKTISKAKGQPREPQVYTLPPCRDELTKNQVSLWCLVKGFYPSDIAVEWESNGQPENNYKTTPPVLDSDGSFFLYSKLTVDKSRWQQGNVFSCSVMHEALHNHYTQKSLSLSPGKGGSGGSGGSGGSGGSGGSGGSGGSGGSGGSGGSGGSGGSGGSGGSGGSGGSGGSGGSGGSSSSTKKTQLQLEHLLLDLQMILNGINNYKNPKLTAMLTKKFAMPKKATELKHLQCLEEELKPLEEVLNGAQSKNFHLRPRDLISGINVIVLELKGSETTFMCEYADETATIVEFLNRWITFAQSIISTLT

SEQ ID NO: 355 - protein, 435 aa, Artificial Sequence
  Synthetic polymer.
MKLPVRLLVLMFWIPASSSDKTHTCPPCPAPEAAGGPSVFLFPPKPKDTLMISRTPEVTCVVVDVSHEDPEVKFNWYVDGVEVHNAKTKPREEQYNSTYRVVSVLTVLHQDWLNGKEYKCQVSNKALPAPIEKTISKAKGQPREPQVYTLPPCRDELTKNQVSLWCLVKGFYPSDIAVEWESNGQPENNYKTTPPVLDSDGSFFLYSKLTVDKSRWQQGNVFSCSVMHEALHNHYTQKSLSLSPGKGGSGGSGGSGGSGGSGGSGGSGGSGGSGGSGGSGGSGGSGGSGGSGGSGGSGGSGGSGGSSSTKKTQLQLEHLLLDLQMILNGINNYKNPKLTAMLTKKFAMPKKATELKHLQCLEEELKPLEEVLNGAQSKNFHLRPRDLISGINVIVLELKGSETTFMCEYADETATIVEFLNRWITFAQSIISTLT

SEQ ID NO: 356 - protein, 434 aa, Artificial Sequence
  Synthetic polymer.
MKLPVRLLVLMFWIPASSSDKTHTCPPCPAPEAAGGPSVFLFPPKPKDTLMISRTPEVTCVVVDVSHEDPEVKFNWYVDGVEVHNAKTKPREEQYNSTYRVVSVLTVLHQDWLNGKEYKCQVSNKALPAPIEKTISKAKGQPREPQVYTLPPCRDELTKNQVSLWCLVKGFYPSDIAVEWESNGQPENNYKTTPPVLDSDGSFFLYSKLTVDKSRWQQGNVFSCSVMHEALHNHYTQKSLSLSPGKGGSGGSGGSGGSGGSGGSGGSGGSGGSGGSGGSGGSGGSGGSGGSGGSGGSGGSGGSGGSSTKKTQLQLEHLLLDLQMILNGINNYKNPKLTAMLTKKFAMPKKATELKHLQCLEEELKPLEEVLNGAQSKNFHLRPRDLISGINVIVLELKGSETTFMCEYADETATIVEFLNRWITFAQSIISTLT

SEQ ID NO: 357 - protein, 433 aa, Artificial Sequence
  Synthetic polymer.
MKLPVRLLVLMFWIPASSSDKTHTCPPCPAPEAAGGPSVFLFPPKPKDTLMISRTPEVTCVVVDVSHEDPEVKFNWYVDGVEVHNAKTKPREEQYNSTYRVVSVLTVLHQDWLNGKEYKCQVSNKALPAPIEKTISKAKGQPREPQVYTLPPCRDELTKNQVSLWCLVKGFYPSDIAVEWESNGQPENNYKTTPPVLDSDGSFFLYSKLTVDKSRWQQGNVFSCSVMHEALHNHYTQKSLSLSPGKGGSGGSGGSGGSGGSGGSGGSGGSGGSGGSGGSGGSGGSGGSGGSGGSGGSGGSGGSGGSTKKTQLQLEHLLLDLQMILNGINNYKNPKLTAMLTKKFAMPKKATELKHLQCLEEELKPLEEVLNGAQSKNFHLRPRDLISGINVIVLELKGSETTFMCEYADETATIVEFLNRWITFAQSIISTLT

SEQ ID NO: 358 - protein, 432 aa, Artificial Sequence
  Synthetic polymer.
MKLPVRLLVLMFWIPASSSDKTHTCPPCPAPEAAGGPSVFLFPPKPKDTLMISRTPEVTCVVVDVSHEDPEVKFNWYVDGVEVHNAKTKPREEQYNSTYRVVSVLTVLHQDWLNGKEYKCQVSNKALPAPIEKTISKAKGQPREPQVYTLPPCRDELTKNQVSLWCLVKGFYPSDIAVEWESNGQPENNYKTTPPVLDSDGSFFLYSKLTVDKSRWQQGNVFSCSVMHEALHNHYTQKSLSLSPGKGGSGGSGGSGGSGGSGGSGGSGGSGGSGGSGGSGGSGGSGGSGGSGGSGGSGGSGGSGGSKKTQLQLEHLLLDLQMILNGINNYKNPKLTAMLTKKFAMPKKATELKHLQCLEEELKPLEEVLNGAQSKNFHLRPRDLISGINVIVLELKGSETTFMCEYADETATIVEFLNRWITFAQSIISTLT

SEQ ID NO: 359 - protein, 431 aa, Artificial Sequence
  Synthetic polymer.
MKLPVRLLVLMFWIPASSSDKTHTCPPCPAPEAAGGPSVFLFPPKPKDTLMISRTPEVTCVVVDVSHEDPEVKFNWYVDGVEVHNAKTKPREEQYNSTYRVVSVLTVLHQDWLNGKEYKCQVSNKALPAPIEKTISKAKGQPREPQVYTLPPCRDELTKNQVSLWCLVKGFYPSDIAVEWESNGQPENNYKTTPPVLDSDGSFFLYSKLTVDKSRWQQGNVFSCSVMHEALHNHYTQKSLSLSPGKGGSGGSGGSGGSGGSGGSGGSGGSGGSGGSGGSGGSGGSGGSGGSGGSGGSGGSGGSGGSKTQLQLEHLLLDLQMILNGINNYKNPKLTAMLTKKFAMPKKATELKHLQCLEEELKPLEEVLNGAQSKNFHLRPRDLISGINVIVLELKGSETTFMCEYADETATIVEFLNRWITFAQSIISTLT

SEQ ID NO: 360 - protein, 426 aa, Artificial Sequence; identical to SEQ ID NO: 297
  Synthetic polymer.

SEQ ID NO: 361 - protein, 439 aa, Artificial Sequence; identical to SEQ ID NO: 347
  Synthetic polymer.

SEQ ID NO: 362 - protein, 574 aa, Artificial Sequence
  Synthetic polymer.
MEFGLSWLFLVAILKGVQCDVQLQESGGGLVQPGGSLRLSCAASGSIFSINVMGWYRQTPGKERELVAKITNFGITSYADSAQGRFTISRGNAKNTVYLQMNSLKPEDTAVYYCNLDTTGWGPPPYQYWGQGTQVTVSSGGSGGSGGSGGSGGSDKTHTCPPCPAPEAAGGPSVFLFPPKPKDTLMISRTPEVTCVVVDVSHEDPEVKFNWYVDGVEVHNAKTKPREEQYNSTYRVVSVLTVLHQDWLNGKEYKCQVSNKALPAPIEKTISKAKGQPREPQVYTLPPCRDELTKNQVSLWCLVKGFYPSDIAVEWESNGQPENNYKTTPPVLDSDGSFFLYSKLTVDKSRWQQGNVFSCSVMHEALHNHYTQKSLSLSPGKGGSGGSGGSGGSGGSGGSGGSGGSGGSGGSGGSGGSGGSGGSGGSGGSGGSGGSGGSGGSAPTSSSTKKTQLQLEHLLLDLQMILNGINNYKNPKLTAMLTKKFYMPKKATELKHLQCLEEELKPLEEVLNLAQSKNFHLRPRDLISGINVIVLELKGSETTFMCEYADETATIVEFLNRWITFAQSIISTLT

SEQ ID NO: 363 - protein, 575 aa, Artificial Sequence
  Synthetic polymer.
MEFGLSWLFLVAILKGVQCDVQLQESGGGLVQAGDSLRLTCTASGRTFSNYGIGWFRQAPGKEREFVAGINWSGESADYADSVKGRFTISRDNAKNTVYLQMNSLKPEDTAVYYCAAGESGVWVGGLDYWGQGTQVTVSSGGSGGSGGSGGSGGSDKTHTCPPCPAPEAAGGPSVFLFPPKPKDTLMISRTPEVTCVVVDVSHEDPEVKFNWYVDGVEVHNAKTKPREEQYNSTYRVVSVLTVLHQDWLNGKEYKCQVSNKALPAPIEKTISKAKGQPREPQVYTLPPCRDELTKNQVSLWCLVKGFYPSDIAVEWESNGQPENNYKTTPPVLDSDGSFFLYSKLTVDKSRWQQGNVFSCSVMHEALHNHYTQKSLSLSPGKGGSGGSGGSGGSGGSGGSGGSGGSGGSGGSGGSGGSGGSGGSGGSGGSGGSGGSGGSGGSAPTSSSTKKTQLQLEHLLLDLQMILNGINNYKNPKLTAMLTKKFYMPKKATELKHLQCLEEELKPLEEVLNLAQSKNFHLRPRDLISGINVIVLELKGSETTFMCEYADETATIVEFLNRWITFAQSIISTLT

SEQ ID NO: 364 - protein, 587 aa, Artificial Sequence
  Synthetic polymer.
MEFGLSWLFLVAILKGVQCDVQLQESGGGLVQAGGSLRLSCAASGFSSDDYTIGWFRQAPGKEREGISCFSSSDGSTGFADSVKGRFTISSDNATNTVYLEMNSLKPEDTAVYYCAADFNVWSPPICGSRWYGPPPGGMEYWGKGTQVTVSSGGSGGSGGSGGSGGSDKTHTCPPCPAPEAAGGPSVFLFPPKPKDTLMISRTPEVTCVVVDVSHEDPEVKFNWYVDGVEVHNAKTKPREEQYNSTYRVVSVLTVLHQDWLNGKEYKCQVSNKALPAPIEKTISKAKGQPREPQVYTLPPCRDELTKNQVSLWCLVKGFYPSDIAVEWESNGQPENNYKTTPPVLDSDGSFFLYSKLTVDKSRWQQGNVFSCSVMHEALHNHYTQKSLSLSPGKGGSGGSGGSGGSGGSGGSGGSGGSGGSGGSGGSGGSGGSGGSGGSGGSGGSGGSGGSGGSAPTSSSTKKTQLQLEHLLLDLQMILNGINNYKNPKLTAMLTKKFYMPKKATELKHLQCLEEELKPLEEVLNLAQSKNFHLRPRDLISGINVIVLELKGSETTFMCEYADETATIVEFLNRWITFAQSIISTLT

SEQ ID NO: 365 - protein, 585 aa, Artificial Sequence
  Synthetic polymer.
MEFGLSWLFLVAILKGVQCDVQLQESGGGLVQAGGSLRLSCAVSGFTFDNYAIGWFRQAPGKEREGVSSISRSDGSTYYADSVRGRFTISSDNAKNTVYLQMNSLKPEDTAVYYCAAETSADSGEFRFGWVLKPSLYDYWGQGTQVTVSSGGSGGSGGSGGSGGSDKTHTCPPCPAPEAAGGPSVFLFPPKPKDTLMISRTPEVTCVVVDVSHEDPEVKFNWYVDGVEVHNAKTKPREEQYNSTYRVVSVLTVLHQDWLNGKEYKCQVSNKALPAPIEKTISKAKGQPREPQVYTLPPCRDELTKNQVSLWCLVKGFYPSDIAVEWESNGQPENNYKTTPPVLDSDGSFFLYSKLTVDKSRWQQGNVFSCSVMHEALHNHYTQKSLSLSPGKGGSGGSGGSGGSGGSGGSGGSGGSGGSGGSGGSGGSGGSGGSGGSGGSGGSGGSGGSGGSAPTSSSTKKTQLQLEHLLLDLQMILNGINNYKNPKLTAMLTKKFYMPKKATELKHLQCLEEELKPLEEVLNLAQSKNFHLRPRDLISGINVIVLELKGSETTFMCEYADETATIVEFLNRWITFAQSIISTLT

SEQ ID NO: 366 - protein, 582 aa, Artificial Sequence
  Synthetic polymer.
MEFGLSWLFLVAILKGVQCDVQLQESGGGLVQAGGSLRLSCAASGRTFSSYVMGWFRQAPGKEREFVAQISWSAGSIYYADSVKGRFTISNDNAKRTVYLQMNSLKPEDTAVYYCAERGYAYCSDDGCQRTQDYDYWGQGTQVTVSSGGSGGSGGSGGSGGSDKTHTCPPCPAPEAAGGPSVFLFPPKPKDTLMISRTPEVTCVVVDVSHEDPEVKFNWYVDGVEVHNAKTKPREEQYNSTYRVVSVLTVLHQDWLNGKEYKCQVSNKALPAPIEKTISKAKGQPREPQVYTLPPCRDELTKNQVSLWCLVKGFYPSDIAVEWESNGQPENNYKTTPPVLDSDGSFFLYSKLTVDKSRWQQGNVFSCSVMHEALHNHYTQKSLSLSPGKGGSGGSGGSGGSGGSGGSGGSGGSGGSGGSGGSGGSGGSGGSGGSGGSGGSGGSGGSGGSAPTSSSTKKTQLQLEHLLLDLQMILNGINNYKNPKLTAMLTKKFYMPKKATELKHLQCLEEELKPLEEVLNLAQSKNFHLRPRDLISGINVIVLELKGSETTFMCEYADETATIVEFLNRWITFAQSIISTLT

SEQ ID NO: 367 - protein, 586 aa, Artificial Sequence
  Synthetic polymer.
MEFGLSWLFLVAILKGVQCDVQLQESGGGLVQAGGSLRLSCAASGFTFDDYAIGWFRQAPGKEREGVSCIRVSDGSTYYADPVKGRFTISSDNAKNTVYLQMNSLKPEDAAVYYCAAGSLYTCVQSIVVVPARPYYDMDYWGKGTQVTVSSGGSGGSGGSGGSGGSDKTHTCPPCPAPEAAGGPSVFLFPPKPKDTLMISRTPEVTCVVVDVSHEDPEVKFNWYVDGVEVHNAKTKPREEQYNSTYRVVSVLTVLHQDWLNGKEYKCQVSNKALPAPIEKTISKAKGQPREPQVYTLPPCRDELTKNQVSLWCLVKGFYPSDIAVEWESNGQPENNYKTTPPVLDSDGSFFLYSKLTVDKSRWQQGNVFSCSVMHEALHNHYTQKSLSLSPGKGGSGGSGGSGGSGGSGGSGGSGGSGGSGGSGGSGGSGGSGGSGGSGGSGGSGGSGGSGGSAPTSSSTKKTQLQLEHLLLDLQMILNGINNYKNPKLTAMLTKKFYMPKKATELKHLQCLEEELKPLEEVLNLAQSKNFHLRPRDLISGINVIVLELKGSETTFMCEYADETATIVEFLNRWITFAQSIISTLT

SEQ ID NO: 368 - protein, 573 aa, Artificial Sequence
  Synthetic polymer.
MEFGLSWLFLVAILKGVQCDVQLQESGGGLVQPGGSLRLSCAASGFTFDDYAMSWVRQVPGKGLEWVSTINWNGGSAEYAEPVKGRFTISRDNAKNTVYLQMNSLKLEDTAVYYCAKDADLVWYNLRTGQGTQVTVSSGGSGGSGGSGGSGGSDKTHTCPPCPAPEAAGGPSVFLFPPKPKDTLMISRTPEVTCVVVDVSHEDPEVKFNWYVDGVEVHNAKTKPREEQYNSTYRVVSVLTVLHQDWLNGKEYKCQVSNKALPAPIEKTISKAKGQPREPQVYTLPPCRDELTKNQVSLWCLVKGFYPSDIAVEWESNGQPENNYKTTPPVLDSDGSFFLYSKLTVDKSRWQQGNVFSCSVMHEALHNHYTQKSLSLSPGKGGSGGSGGSGGSGGSGGSGGSGGSGGSGGSGGSGGSGGSGGSGGSGGSGGSGGSGGSGGSAPTSSSTKKTQLQLEHLLLDLQMILNGINNYKNPKLTAMLTKKFYMPKKATELKHLQCLEEELKPLEEVLNLAQSKNFHLRPRDLISGINVIVLELKGSETTFMCEYADETATIVEFLNRWITFAQSIISTLT

SEQ ID NO: 369 - protein, 246 aa, Artificial Sequence; identical to SEQ ID NO: 290
  Synthetic polymer.

SEQ ID NO: 370 - protein, 426 aa, Artificial Sequence; identical to SEQ ID NO: 297
  Synthetic polymer.

SEQ ID NO: 371 - protein, 439 aa, Artificial Sequence; identical to SEQ ID NO: 347
  Synthetic polymer.

SEQ ID NO: 372 - protein, 820 aa, Artificial Sequence
  Synthetic polymer.
MYRMQLLSCIALSLALVTNSAPTSSSTKKTQLQLEHLLLDLQMILNGINNYKNPKLTAMLTKKFAMPKKATELKHLQCLEEELKPLEEVLNGAQSKNFHLRPRDLISGINVIVLELKGSETTFMCEYADETATIVEFLNRWITFAQSIISTLTGGSGGSGGSGGSGGSGGSGGSGGSGGSGGSGGSGGSGGSGGSGGSGGSGGSGGSGGSDKTHTCPPCPAPEAAGGPSVFLFPPKPKDTLMISRTPEVTCVVVDVSHEDPEVKFNWYVDGVEVHNAKTKPREEQYNSTYRVVSVLTVLHQDWLNGKEYKCQVSNKALPAPIEKTISKAKGQPREPQVYTLPPCRDELTKNQVSLWCLVKGFYPSDIAVEWESNGQPENNYKTTPPVLDSDGSFFLYSKLTVDKSRWQQGNVFSCSVMHEALHNHYTQKSLSLSPGKGGSGGSGGSGGSGGSGGSGGSGGSGGSGGSGGSGGSGGSGGSGGSGGSGGSGGSGGSGGSAPTSSSTKKTQLQLEHLLLDLQMILNGINNYKNPKLTAMLTKKFAMPKKATELKHLQCLEEELKPLEEVLNGAQSKNFHLRPRDLISGINVIVLELKGSETTFMCEYADETATIVEFLNRWITFAQSIISTLTGGSGGSGGSGGSGGSGGSGGSGGSGGSGGSGGSGGSGGSGGSGGSGGSGGSGGSGGSAPTSSSTKKTQLQLEHLLLDLQMILNGINNYKNPKLTAMLTKKFAMPKKATELKHLQCLEEELKPLEEVLNGAQSKNFHLRPRDLISGINVIVLELKGSETTFMCEYADETATIVEFLNRWITFAQSIISTLT

SEQ ID NO: 373 - protein, 616 aa, Artificial Sequence
  Synthetic polymer.
MGWSCIIFFLVATATGVHSQVQLQESGGGLVQPGGSLRLSCAASGSIFSINVMGWYRQTPGKERELVAKITNFGITSYADSAQGRFTISRGNAKNTVYLQMNSLKPEDTAVYYCNLDTTGWGPPPYQYWGQGTQVTVSSGGSGGSGGSGGSGGSGGSGGSGGSGGSGGSGGSGGSGGSGGSGGSGGSGGSGGSGGSGGSDKTHTCPPCPAPEAAGGPSVFLFPPKPKDTLMISRTPEVTCVVVDVSHEDPEVKFNWYVDGVEVHNAKTKPREEQYNSTYRVVSVLTVLHQDWLNGKEYKCQVSNKALPAPIEKTISKAKGQPREPQVCTLPPSRDELTKNQVSLSCAVKGFYPSDIAVEWESNGQPENNYKTTPPVLDSDGSFFLVSKLTVDKSRWQQGNVFSCSVMHEALHNHYTQKSLSLSPGKGGSGGSGGSGGSGGSGGSGGSGGSGGSGGSGGSGGSGGSGGSGGSGGSGGSGGSGGSAPTSSSTKKTQLQLEHLLLDLQMILNGINNYKNPKLTAMLTKKFAMPKKATELKHLQCLEEELKPLEEVLNGAQSKNFHLRPRDLISGINVIVLELKGSETTFMCEYADETATIVEFLNRWITFAQSIISTLT

SEQ ID NO: 374 - protein, 632 aa, Artificial Sequence
  Synthetic polymer.
MKLPVRLLVLMFWIPASSSDKTHTCPPCPAPEAAGGPSVFLFPPKPKDTLMISRTPEVTCVVVDVSHEDPEVKFNWYVDGVEVHNAKTKPREEQYNSTYRVVSVLTVLHQDWLNGKEYKCQVSNKALPAPIEKTISKAKGQPREPQVYTLPPCRDELTKNQVSLWCLVKGFYPSDIAVEWESNGQPENNYKTTPPVLDSDGSFFLYSKLTVDKSRWQQGNVFSCSVMHEALHNHYTQKSLSLSPGKGGSGGSGGSGGSGGSGGSGGSGGSGGSGGSGGSGGSGGSGGSGGSGGSGGSGGSGGSGGSAPTSSSTKKTQLQLEHLLLDLQMILNGINNYKNPKLTAMLTKKFAMPKKATELKHLQCLEEELKPLEEVLNGAQSKNFHLRPRDLISGINVIVLELKGSETTFMCEYADETATIVEFLNRWITFAQSIISTLTGGSGGSGGSGGSGGSGGSGGSGGSGGSGGSGGSGGSGGSGGSGGSGGSGGSGGSGGSGGSAPTSSSTKKTQLQLEHLLLDLQMILNGINNYKNPKLTAMLTKKFAMPKKATELKHLQCLEEELKPLEEVLNGAQSKNFHLRPRDLISGINVIVLELKGSETTFMCEYADETATIVEFLNRWITFAQSIISTLT

SEQ ID NO: 375 - protein, 633 aa, Artificial Sequence
  Synthetic polymer.
MYRMQLLSCIALSLALVTNSAPTSSSTKKTQLQLEHLLLDLQMILNGINNYKNPKLTAMLTKKFAMPKKATELKHLQCLEEELKPLEEVLNGAQSKNFHLRPRDLISGINVIVLELKGSETTFMCEYADETATIVEFLNRWITFAQSIISTLTGGSGGSGGSGGSGGSGGSGGSGGSGGSGGSGGSGGSGGSGGSGGSGGSGGSGGSGGSGGSAPTSSSTKKTQLQLEHLLLDLQMILNGINNYKNPKLTAMLTKKFAMPKKATELKHLQCLEEELKPLEEVLNGAQSKNFHLRPRDLISGINVIVLELKGSETTFMCEYADETATIVEFLNRWITFAQSIISTLTGGSGGSGGSGGSGGSGGSGGSGGSGGSGGSGGSGGSGGSGGSGGSGGSGGSGGSGGSGGSDKTHTCPPCPAPEAAGGPSVFLFPPKPKDTLMISRTPEVTCVVVDVSHEDPEVKFNWYVDGVEVHNAKTKPREEQYNSTYRVVSVLTVLHQDWLNGKEYKCQVSNKALPAPIEKTISKAKGQPREPQVYTLPPCRDELTKNQVSLWCLVKGFYPSDIAVEWESNGQPENNYKTTPPVLDSDGSFFLYSKLTVDKSRWQQGNVFSCSVMHEALHNHYTQKSLSLSPGK

SEQ ID NO: 376 - protein, 426 aa, Artificial Sequence; identical to SEQ ID NO: 297
  Synthetic polymer.

SEQ ID NO: 377 - protein, 439 aa, Artificial Sequence; identical to SEQ ID NO: 291
  Synthetic polymer.

SEQ ID NO: 378 - protein, 439 aa, Artificial Sequence
  Synthetic polymer.
MKLPVRLLVLMFWIPASSSDKTHTCPPCPAPEAAGGPSVFLFPPKPKDTLMISRTPEVTCVVVDVSHEDPEVKFNWYVDGVEVHNAKTKPREEQYNSTYRVVSVLTVLHQDWLNGKEYKCQVSNKALPAPIEKTISKAKGQPREPQVYTLPPCRDELTKNQVSLWCLVKGFYPSDIAVEWESNGQPENNYKTTPPVLDSDGSFFLYSKLTVDKSRWQQGNVFSCSVMHEALHNHYTQKSLSLSPGKGGSGGSGGSGGSGGSGGSGGSGGSGGSGGSGGSGGSGGSGGSGGSGGSGGSGGSGGSGGSAPTSSSTKKTQLQLEHLLLELQMILNGINNYKNPKLTRMLTFKFYMPKKATELKHLQCLEEELKPLEEVLNLAQSKNFHLRPRDLISNINVIVLELKGSETTFMCEYADETATIVEFLNRWITFAASIISTLT

SEQ ID NO: 379 - protein, 439 aa, Artificial Sequence
  Synthetic polymer.
MKLPVRLLVLMFWIPASSSDKTHTCPPCPAPEAAGGPSVFLFPPKPKDTLMISRTPEVTCVVVDVSHEDPEVKFNWYVDGVEVHNAKTKPREEQYNSTYRVVSVLTVLHQDWLNGKEYKCQVSNKALPAPIEKTISKAKGQPREPQVYTLPPCRDELTKNQVSLWCLVKGFYPSDIAVEWESNGQPENNYKTTPPVLDSDGSFFLYSKLTVDKSRWQQGNVFSCSVMHEALHNHYTQKSLSLSPGKGGSGGSGGSGGSGGSGGSGGSGGSGGSGGSGGSGGSGGSGGSGGSGGSGGSGGSGGSGGSAPTSSSTKKTQLQLEHLLLELQMILNGINNYKNPKLTRMLTFKFYMPKKATELKHLQCLEEELKPLEEVLNLAQSKNFHLRPRDLISNINVIVLELKGSETTFMCEYADETATIVEFLNRWITFADSIISTLT

SEQ ID NO: 380 - protein, 439 aa, Artificial Sequence
  Synthetic polymer.
MKLPVRLLVLMFWIPASSSDKTHTCPPCPAPEAAGGPSVFLFPPKPKDTLMISRTPEVTCVVVDVSHEDPEVKFNWYVDGVEVHNAKTKPREEQYNSTYRVVSVLTVLHQDWLNGKEYKCQVSNKALPAPIEKTISKAKGQPREPQVYTLPPCRDELTKNQVSLWCLVKGFYPSDIAVEWESNGQPENNYKTTPPVLDSDGSFFLYSKLTVDKSRWQQGNVFSCSVMHEALHNHYTQKSLSLSPGKGGSGGSGGSGGSGGSGGSGGSGGSGGSGGSGGSGGSGGSGGSGGSGGSGGSGGSGGSGGSAPTSSSTKKTQLQLEHLLLELQMILNGINNYKNPKLTRMLTFKFYMPKKATELKHLQCLEEELKPLEEVLNLAQSKNFHLRPRDLISNINVIVLELKGSETTFMCEYADETATIVEFLNRWITFAESIISTLT

SEQ ID NO: 381 - protein, 439 aa, Artificial Sequence
  Synthetic polymer.
MKLPVRLLVLMFWIPASSSDKTHTCPPCPAPEAAGGPSVFLFPPKPKDTLMISRTPEVTCVVVDVSHEDPEVKFNWYVDGVEVHNAKTKPREEQYNSTYRVVSVLTVLHQDWLNGKEYKCQVSNKALPAPIEKTISKAKGQPREPQVYTLPPCRDELTKNQVSLWCLVKGFYPSDIAVEWESNGQPENNYKTTPPVLDSDGSFFLYSKLTVDKSRWQQGNVFSCSVMHEALHNHYTQKSLSLSPGKGGSGGSGGSGGSGGSGGSGGSGGSGGSGGSGGSGGSGGSGGSGGSGGSGGSGGSGGSGGSAPTSSSTKKTQLQLEHLLLELQMILNGINNYKNPKLTRMLTFKFYMPKKATELKHLQCLEEELKPLEEVLNLAQSKNFHLRPRDLISNINVIVLELKGSETTFMCEYADETATIVEFLNRWITFAFSIISTLT

SEQ ID NO: 382 - protein, 439 aa, Artificial Sequence
  Synthetic polymer.
MKLPVRLLVLMFWIPASSSDKTHTCPPCPAPEAAGGPSVFLFPPKPKDTLMISRTPEVTCVVVDVSHEDPEVKFNWYVDGVEVHNAKTKPREEQYNSTYRVVSVLTVLHQDWLNGKEYKCQVSNKALPAPIEKTISKAKGQPREPQVYTLPPCRDELTKNQVSLWCLVKGFYPSDIAVEWESNGQPENNYKTTPPVLDSDGSFFLYSKLTVDKSRWQQGNVFSCSVMHEALHNHYTQKSLSLSPGKGGSGGSGGSGGSGGSGGSGGSGGSGGSGGSGGSGGSGGSGGSGGSGGSGGSGGSGGSGGSAPTSSSTKKTQLQLEHLLLELQMILNGINNYKNPKLTRMLTFKFYMPKKATELKHLQCLEEELKPLEEVLNLAQSKNFHLRPRDLISNINVIVLELKGSETTFMCEYADETATIVEFLNRWITFAGSIISTLT

SEQ ID NO: 383 - protein, 439 aa, Artificial Sequence
  Synthetic polymer.
MKLPVRLLVLMFWIPASSSDKTHTCPPCPAPEAAGGPSVFLFPPKPKDTLMISRTPEVTCVVVDVSHEDPEVKFNWYVDGVEVHNAKTKPREEQYNSTYRVVSVLTVLHQDWLNGKEYKCQVSNKALPAPIEKTISKAKGQPREPQVYTLPPCRDELTKNQVSLWCLVKGFYPSDIAVEWESNGQPENNYKTTPPVLDSDGSFFLYSKLTVDKSRWQQGNVFSCSVMHEALHNHYTQKSLSLSPGKGGSGGSGGSGGSGGSGGSGGSGGSGGSGGSGGSGGSGGSGGSGGSGGSGGSGGSGGSGGSAPTSSSTKKTQLQLEHLLLELQMILNGINNYKNPKLTRMLTFKFYMPKKATELKHLQCLEEELKPLEEVLNLAQSKNFHLRPRDLISNINVIVLELKGSETTFMCEYADETATIVEFLNRWITFAHSIISTLT

SEQ ID NO: 384 - protein, 439 aa, Artificial Sequence
  Synthetic polymer.
MKLPVRLLVLMFWIPASSSDKTHTCPPCPAPEAAGGPSVFLFPPKPKDTLMISRTPEVTCVVVDVSHEDPEVKFNWYVDGVEVHNAKTKPREEQYNSTYRVVSVLTVLHQDWLNGKEYKCQVSNKALPAPIEKTISKAKGQPREPQVYTLPPCRDELTKNQVSLWCLVKGFYPSDIAVEWESNGQPENNYKTTPPVLDSDGSFFLYSKLTVDKSRWQQGNVFSCSVMHEALHNHYTQKSLSLSPGKGGSGGSGGSGGSGGSGGSGGSGGSGGSGGSGGSGGSGGSGGSGGSGGSGGSGGSGGSGGSAPTSSSTKKTQLQLEHLLLELQMILNGINNYKNPKLTRMLTFKFYMPKKATELKHLQCLEEELKPLEEVLNLAQSKNFHLRPRDLISNINVIVLELKGSETTFMCEYADETATIVEFLNRWITFAISIISTLT

SEQ ID NO: 385 - protein, 439 aa, Artificial Sequence
  Synthetic polymer.
MKLPVRLLVLMFWIPASSSDKTHTCPPCPAPEAAGGPSVFLFPPKPKDTLMISRTPEVTCVVVDVSHEDPEVKFNWYVDGVEVHNAKTKPREEQYNSTYRVVSVLTVLHQDWLNGKEYKCQVSNKALPAPIEKTISKAKGQPREPQVYTLPPCRDELTKNQVSLWCLVKGFYPSDIAVEWESNGQPENNYKTTPPVLDSDGSFFLYSKLTVDKSRWQQGNVFSCSVMHEALHNHYTQKSLSLSPGKGGSGGSGGSGGSGGSGGSGGSGGSGGSGGSGGSGGSGGSGGSGGSGGSGGSGGSGGSGGSAPTSSSTKKTQLQLEHLLLELQMILNGINNYKNPKLTRMLTFKFYMPKKATELKHLQCLEEELKPLEEVLNLAQSKNFHLRPRDLISNINVIVLELKGSETTFMCEYADETATIVEFLNRWITFAKSIISTLT

SEQ ID NO: 386 - protein, 439 aa, Artificial Sequence
  Synthetic polymer.
MKLPVRLLVLMFWIPASSSDKTHTCPPCPAPEAAGGPSVFLFPPKPKDTLMISRTPEVTCVVVDVSHEDPEVKFNWYVDGVEVHNAKTKPREEQYNSTYRVVSVLTVLHQDWLNGKEYKCQVSNKALPAPIEKTISKAKGQPREPQVYTLPPCRDELTKNQVSLWCLVKGFYPSDIAVEWESNGQPENNYKTTPPVLDSDGSFFLYSKLTVDKSRWQQGNVFSCSVMHEALHNHYTQKSLSLSPGKGGSGGSGGSGGSGGSGGSGGSGGSGGSGGSGGSGGSGGSGGSGGSGGSGGSGGSGGSGGSAPTSSSTKKTQLQLEHLLLELQMILNGINNYKNPKLTRMLTFKFYMPKKATELKHLQCLEEELKPLEEVLNLAQSKNFHLRPRDLISNINVIVLELKGSETTFMCEYADETATIVEFLNRWITFALSIISTLT

SEQ ID NO: 387 - protein, 439 aa, Artificial Sequence
  Synthetic polymer.
MKLPVRLLVLMFWIPASSSDKTHTCPPCPAPEAAGGPSVFLFPPKPKDTLMISRTPEVTCVVVDVSHEDPEVKFNWYVDGVEVHNAKTKPREEQYNSTYRVVSVLTVLHQDWLNGKEYKCQVSNKALPAPIEKTISKAKGQPREPQVYTLPPCRDELTKNQVSLWCLVKGFYPSDIAVEWESNGQPENNYKTTPPVLDSDGSFFLYSKLTVDKSRWQQGNVFSCSVMHEALHNHYTQKSLSLSPGKGGSGGSGGSGGSGGSGGSGGSGGSGGSGGSGGSGGSGGSGGSGGSGGSGGSGGSGGSGGSAPTSSSTKKTQLQLEHLLLELQMILNGINNYKNPKLTRMLTFKFYMPKKATELKHLQCLEEELKPLEEVLNLAQSKNFHLRPRDLISNINVIVLELKGSETTFMCEYADETATIVEFLNRWITFAMSIISTLT

SEQ ID NO: 388 - protein, 439 aa, Artificial Sequence
  Synthetic polymer.
MKLPVRLLVLMFWIPASSSDKTHTCPPCPAPEAAGGPSVFLFPPKPKDTLMISRTPEVTCVVVDVSHEDPEVKFNWYVDGVEVHNAKTKPREEQYNSTYRVVSVLTVLHQDWLNGKEYKCQVSNKALPAPIEKTISKAKGQPREPQVYTLPPCRDELTKNQVSLWCLVKGFYPSDIAVEWESNGQPENNYKTTPPVLDSDGSFFLYSKLTVDKSRWQQGNVFSCSVMHEALHNHYTQKSLSLSPGKGGSGGSGGSGGSGGSGGSGGSGGSGGSGGSGGSGGSGGSGGSGGSGGSGGSGGSGGSGGSAPTSSSTKKTQLQLEHLLLELQMILNGINNYKNPKLTRMLTFKFYMPKKATELKHLQCLEEELKPLEEVLNLAQSKNFHLRPRDLISNINVIVLELKGSETTFMCEYADETATIVEFLNRWITFANSIISTLT

SEQ ID NO: 389 - protein, 439 aa, Artificial Sequence
  Synthetic polymer.
MKLPVRLLVLMFWIPASSSDKTHTCPPCPAPEAAGGPSVFLFPPKPKDTLMISRTPEVTCVVVDVSHEDPEVKFNWYVDGVEVHNAKTKPREEQYNSTYRVVSVLTVLHQDWLNGKEYKCQVSNKALPAPIEKTISKAKGQPREPQVYTLPPCRDELTKNQVSLWCLVKGFYPSDIAVEWESNGQPENNYKTTPPVLDSDGSFFLYSKLTVDKSRWQQGNVFSCSVMHEALHNHYTQKSLSLSPGKGGSGGSGGSGGSGGSGGSGGSGGSGGSGGSGGSGGSGGSGGSGGSGGSGGSGGSGGSGGSAPTSSSTKKTQLQLEHLLLELQMILNGINNYKNPKLTRMLTFKFYMPKKATELKHLQCLEEELKPLEEVLNLAQSKNFHLRPRDLISNINVIVLELKGSETTFMCEYADETATIVEFLNRWITFAPSIISTLT

SEQ ID NO: 390 - protein, 439 aa, Artificial Sequence
  Synthetic polymer.
MKLPVRLLVLMFWIPASSSDKTHTCPPCPAPEAAGGPSVFLFPPKPKDTLMISRTPEVTCVVVDVSHEDPEVKFNWYVDGVEVHNAKTKPREEQYNSTYRVVSVLTVLHQDWLNGKEYKCQVSNKALPAPIEKTISKAKGQPREPQVYTLPPCRDELTKNQVSLWCLVKGFYPSDIAVEWESNGQPENNYKTTPPVLDSDGSFFLYSKLTVDKSRWQQGNVFSCSVMHEALHNHYTQKSLSLSPGKGGSGGSGGSGGSGGSGGSGGSGGSGGSGGSGGSGGSGGSGGSGGSGGSGGSGGSGGSGGSAPTSSSTKKTQLQLEHLLLELQMILNGINNYKNPKLTRMLTFKFYMPKKATELKHLQCLEEELKPLEEVLNLAQSKNFHLRPRDLISNINVIVLELKGSETTFMCEYADETATIVEFLNRWITFARSIISTLT

SEQ ID NO: 391 - protein, 439 aa, Artificial Sequence
  Synthetic polymer.
MKLPVRLLVLMFWIPASSSDKTHTCPPCPAPEAAGGPSVFLFPPKPKDTLMISRTPEVTCVVVDVSHEDPEVKFNWYVDGVEVHNAKTKPREEQYNSTYRVVSVLTVLHQDWLNGKEYKCQVSNKALPAPIEKTISKAKGQPREPQVYTLPPCRDELTKNQVSLWCLVKGFYPSDIAVEWESNGQPENNYKTTPPVLDSDGSFFLYSKLTVDKSRWQQGNVFSCSVMHEALHNHYTQKSLSLSPGKGGSGGSGGSGGSGGSGGSGGSGGSGGSGGSGGSGGSGGSGGSGGSGGSGGSGGSGGSGGSAPTSSSTKKTQLQLEHLLLELQMILNGINNYKNPKLTRMLTFKFYMPKKATELKHLQCLEEELKPLEEVLNLAQSKNFHLRPRDLISNINVIVLELKGSETTFMCEYADETATIVEFLNRWITFASSIISTLT

SEQ ID NO: 392 - protein, 439 aa, Artificial Sequence
  Synthetic polymer.
MKLPVRLLVLMFWIPASSSDKTHTCPPCPAPEAAGGPSVFLFPPKPKDTLMISRTPEVTCVVVDVSHEDPEVKFNWYVDGVEVHNAKTKPREEQYNSTYRVVSVLTVLHQDWLNGKEYKCQVSNKALPAPIEKTISKAKGQPREPQVYTLPPCRDELTKNQVSLWCLVKGFYPSDIAVEWESNGQPENNYKTTPPVLDSDGSFFLYSKLTVDKSRWQQGNVFSCSVMHEALHNHYTQKSLSLSPGKGGSGGSGGSGGSGGSGGSGGSGGSGGSGGSGGSGGSGGSGGSGGSGGSGGSGGSGGSGGSAPTSSSTKKTQLQLEHLLLELQMILNGINNYKNPKLTRMLTFKFYMPKKATELKHLQCLEEELKPLEEVLNLAQSKNFHLRPRDLISNINVIVLELKGSETTFMCEYADETATIVEFLNRWITFATSIISTLT

SEQ ID NO: 393 - protein, 439 aa, Artificial Sequence
  Synthetic polymer.
MKLPVRLLVLMFWIPASSSDKTHTCPPCPAPEAAGGPSVFLFPPKPKDTLMISRTPEVTCVVVDVSHEDPEVKFNWYVDGVEVHNAKTKPREEQYNSTYRVVSVLTVLHQDWLNGKEYKCQVSNKALPAPIEKTISKAKGQPREPQVYTLPPCRDELTKNQVSLWCLVKGFYPSDIAVEWESNGQPENNYKTTPPVLDSDGSFFLYSKLTVDKSRWQQGNVFSCSVMHEALHNHYTQKSLSLSPGKGGSGGSGGSGGSGGSGGSGGSGGSGGSGGSGGSGGSGGSGGSGGSGGSGGSGGSGGSGGSAPTSSSTKKTQLQLEHLLLELQMILNGINNYKNPKLTRMLTFKFYMPKKATELKHLQCLEEELKPLEEVLNLAQSKNFHLRPRDLISNINVIVLELKGSETTFMCEYADETATIVEFLNRWITFAVSIISTLT

SEQ ID NO: 394 - protein, 439 aa, Artificial Sequence
  Synthetic polymer.
MKLPVRLLVLMFWIPASSSDKTHTCPPCPAPEAAGGPSVFLFPPKPKDTLMISRTPEVTCVVVDVSHEDPEVKFNWYVDGVEVHNAKTKPREEQYNSTYRVVSVLTVLHQDWLNGKEYKCQVSNKALPAPIEKTISKAKGQPREPQVYTLPPCRDELTKNQVSLWCLVKGFYPSDIAVEWESNGQPENNYKTTPPVLDSDGSFFLYSKLTVDKSRWQQGNVFSCSVMHEALHNHYTQKSLSLSPGKGGSGGSGGSGGSGGSGGSGGSGGSGGSGGSGGSGGSGGSGGSGGSGGSGGSGGSGGSGGSAPTSSSTKKTQLQLEHLLLELQMILNGINNYKNPKLTRMLTFKFYMPKKATELKHLQCLEEELKPLEEVLNLAQSKNFHLRPRDLISNINVIVLELKGSETTFMCEYADETATIVEFLNRWITFAWSIISTLT

SEQ ID NO: 395 - protein, 439 aa, Artificial Sequence
  Synthetic polymer.
MKLPVRLLVLMFWIPASSSDKTHTCPPCPAPEAAGGPSVFLFPPKPKDTLMISRTPEVTCVVVDVSHEDPEVKFNWYVDGVEVHNAKTKPREEQYNSTYRVVSVLTVLHQDWLNGKEYKCQVSNKALPAPIEKTISKAKGQPREPQVYTLPPCRDELTKNQVSLWCLVKGFYPSDIAVEWESNGQPENNYKTTPPVLDSDGSFFLYSKLTVDKSRWQQGNVFSCSVMHEALHNHYTQKSLSLSPGKGGSGGSGGSGGSGGSGGSGGSGGSGGSGGSGGSGGSGGSGGSGGSGGSGGSGGSGGSGGSAPTSSSTKKTQLQLEHLLLELQMILNGINNYKNPKLTRMLTFKFYMPKKATELKHLQCLEEELKPLEEVLNLAQSKNFHLRPRDLISNINVIVLELKGSETTFMCEYADETATIVEFLNRWITFAYSIISTLT

SEQ ID NO: 396 - protein, 439 aa, Artificial Sequence
  Synthetic polymer.
MKLPVRLLVLMFWIPASSSDKTHTCPPCPAPEAAGGPSVFLFPPKPKDTLMISRTPEVTCVVVDVSHEDPEVKFNWYVDGVEVHNAKTKPREEQYNSTYRVVSVLTVLHQDWLNGKEYKCQVSNKALPAPIEKTISKAKGQPREPQVYTLPPCRDELTKNQVSLWCLVKGFYPSDIAVEWESNGQPENNYKTTPPVLDSDGSFFLYSKLTVDKSRWQQGNVFSCSVMHEALHNHYTQKSLSLSPGKGGSGGSGGSGGSGGSGGSGGSGGSGGSGGSGGSGGSGGSGGSGGSGGSGGSGGSGGSGGSAPTSSSTKKTQLQLEHLLLVLQMILNGINNYKNPKLTRMLTFKFYMPKKATELKHLQCLEEELKPLEEVLNLAQSKNFHLRPRDLISNINVIVLELKGSETTFMCEYADETATIVEFLNRWITFAASIISTLT

SEQ ID NO: 397 - protein, 439 aa, Artificial Sequence
  Synthetic polymer.
MKLPVRLLVLMFWIPASSSDKTHTCPPCPAPEAAGGPSVFLFPPKPKDTLMISRTPEVTCVVVDVSHEDPEVKFNWYVDGVEVHNAKTKPREEQYNSTYRVVSVLTVLHQDWLNGKEYKCQVSNKALPAPIEKTISKAKGQPREPQVYTLPPCRDELTKNQVSLWCLVKGFYPSDIAVEWESNGQPENNYKTTPPVLDSDGSFFLYSKLTVDKSRWQQGNVFSCSVMHEALHNHYTQKSLSLSPGKGGSGGSGGSGGSGGSGGSGGSGGSGGSGGSGGSGGSGGSGGSGGSGGSGGSGGSGGSGGSAPTSSSTKKTQLQLEHLLLVLQMILNGINNYKNPKLTRMLTFKFYMPKKATELKHLQCLEEELKPLEEVLNLAQSKNFHLRPRDLISNINVIVLELKGSETTFMCEYADETATIVEFLNRWITFADSIISTLT

SEQ ID NO: 398 - protein, 439 aa, Artificial Sequence
  Synthetic polymer.
MKLPVRLLVLMFWIPASSSDKTHTCPPCPAPEAAGGPSVFLFPPKPKDTLMISRTPEVTCVVVDVSHEDPEVKFNWYVDGVEVHNAKTKPREEQYNSTYRVVSVLTVLHQDWLNGKEYKCQVSNKALPAPIEKTISKAKGQPREPQVYTLPPCRDELTKNQVSLWCLVKGFYPSDIAVEWESNGQPENNYKTTPPVLDSDGSFFLYSKLTVDKSRWQQGNVFSCSVMHEALHNHYTQKSLSLSPGKGGSGGSGGSGGSGGSGGSGGSGGSGGSGGSGGSGGSGGSGGSGGSGGSGGSGGSGGSGGSAPTSSSTKKTQLQLEHLLLVLQMILNGINNYKNPKLTRMLTFKFYMPKKATELKHLQCLEEELKPLEEVLNLAQSKNFHLRPRDLISNINVIVLELKGSETTFMCEYADETATIVEFLNRWITFAESIISTLT

SEQ ID NO: 399 - protein, 439 aa, Artificial Sequence
  Synthetic polymer.
MKLPVRLLVLMFWIPASSSDKTHTCPPCPAPEAAGGPSVFLFPPKPKDTLMISRTPEVTCVVVDVSHEDPEVKFNWYVDGVEVHNAKTKPREEQYNSTYRVVSVLTVLHQDWLNGKEYKCQVSNKALPAPIEKTISKAKGQPREPQVYTLPPCRDELTKNQVSLWCLVKGFYPSDIAVEWESNGQPENNYKTTPPVLDSDGSFFLYSKLTVDKSRWQQGNVFSCSVMHEALHNHYTQKSLSLSPGKGGSGGSGGSGGSGGSGGSGGSGGSGGSGGSGGSGGSGGSGGSGGSGGSGGSGGSGGSGGSAPTSSSTKKTQLQLEHLLLVLQMILNGINNYKNPKLTRMLTFKFYMPKKATELKHLQCLEEELKPLEEVLNLAQSKNFHLRPRDLISNINVIVLELKGSETTFMCEYADETATIVEFLNRWITFAFSIISTLT

SEQ ID NO: 400 - protein, 439 aa, Artificial Sequence
  Synthetic polymer.
MKLPVRLLVLMFWIPASSSDKTHTCPPCPAPEAAGGPSVFLFPPKPKDTLMISRTPEVTCVVVDVSHEDPEVKFNWYVDGVEVHNAKTKPREEQYNSTYRVVSVLTVLHQDWLNGKEYKCQVSNKALPAPIEKTISKAKGQPREPQVYTLPPCRDELTKNQVSLWCLVKGFYPSDIAVEWESNGQPENNYKTTPPVLDSDGSFFLYSKLTVDKSRWQQGNVFSCSVMHEALHNHYTQKSLSLSPGKGGSGGSGGSGGSGGSGGSGGSGGSGGSGGSGGSGGSGGSGGSGGSGGSGGSGGSGGSGGSAPTSSSTKKTQLQLEHLLLVLQMILNGINNYKNPKLTRMLTFKFYMPKKATELKHLQCLEEELKPLEEVLNLAQSKNFHLRPRDLISNINVIVLELKGSETTFMCEYADETATIVEFLNRWITFAGSIISTLT

SEQ ID NO: 401 - protein, 439 aa, Artificial Sequence
  Synthetic polymer.
MKLPVRLLVLMFWIPASSSDKTHTCPPCPAPEAAGGPSVFLFPPKPKDTLMISRTPEVTCVVVDVSHEDPEVKFNWYVDGVEVHNAKTKPREEQYNSTYRVVSVLTVLHQDWLNGKEYKCQVSNKALPAPIEKTISKAKGQPREPQVYTLPPCRDELTKNQVSLWCLVKGFYPSDIAVEWESNGQPENNYKTTPPVLDSDGSFFLYSKLTVDKSRWQQGNVFSCSVMHEALHNHYTQKSLSLSPGKGGSGGSGGSGGSGGSGGSGGSGGSGGSGGSGGSGGSGGSGGSGGSGGSGGSGGSGGSGGSAPTSSSTKKTQLQLEHLLLVLQMILNGINNYKNPKLTRMLTFKFYMPKKATELKHLQCLEEELKPLEEVLNLAQSKNFHLRPRDLISNINVIVLELKGSETTFMCEYADETATIVEFLNRWITFAHSIISTLT

SEQ ID NO: 402 - protein, 439 aa, Artificial Sequence
  Synthetic polymer.
MKLPVRLLVLMFWIPASSSDKTHTCPPCPAPEAAGGPSVFLFPPKPKDTLMISRTPEVTCVVVDVSHEDPEVKFNWYVDGVEVHNAKTKPREEQYNSTYRVVSVLTVLHQDWLNGKEYKCQVSNKALPAPIEKTISKAKGQPREPQVYTLPPCRDELTKNQVSLWCLVKGFYPSDIAVEWESNGQPENNYKTTPPVLDSDGSFFLYSKLTVDKSRWQQGNVFSCSVMHEALHNHYTQKSLSLSPGKGGSGGSGGSGGSGGSGGSGGSGGSGGSGGSGGSGGSGGSGGSGGSGGSGGSGGSGGSGGSAPTSSSTKKTQLQLEHLLLVLQMILNGINNYKNPKLTRMLTFKFYMPKKATELKHLQCLEEELKPLEEVLNLAQSKNFHLRPRDLISNINVIVLELKGSETTFMCEYADETATIVEFLNRWITFAISIISTLT

SEQ ID NO: 403 - protein, 439 aa, Artificial Sequence
  Synthetic polymer.
MKLPVRLLVLMFWIPASSSDKTHTCPPCPAPEAAGGPSVFLFPPKPKDTLMISRTPEVTCVVVDVSHEDPEVKFNWYVDGVEVHNAKTKPREEQYNSTYRVVSVLTVLHQDWLNGKEYKCQVSNKALPAPIEKTISKAKGQPREPQVYTLPPCRDELTKNQVSLWCLVKGFYPSDIAVEWESNGQPENNYKTTPPVLDSDGSFFLYSKLTVDKSRWQQGNVFSCSVMHEALHNHYTQKSLSLSPGKGGSGGSGGSGGSGGSGGSGGSGGSGGSGGSGGSGGSGGSGGSGGSGGSGGSGGSGGSGGSAPTSSSTKKTQLQLEHLLLVLQMILNGINNYKNPKLTRMLTFKFYMPKKATELKHLQCLEEELKPLEEVLNLAQSKNFHLRPRDLISNINVIVLELKGSETTFMCEYADETATIVEFLNRWITFAKSIISTLT

SEQ ID NO: 404 - protein, 439 aa, Artificial Sequence
  Synthetic polymer.
MKLPVRLLVLMFWIPASSSDKTHTCPPCPAPEAAGGPSVFLFPPKPKDTLMISRTPEVTCVVVDVSHEDPEVKFNWYVDGVEVHNAKTKPREEQYNSTYRVVSVLTVLHQDWLNGKEYKCQVSNKALPAPIEKTISKAKGQPREPQVYTLPPCRDELTKNQVSLWCLVKGFYPSDIAVEWESNGQPENNYKTTPPVLDSDGSFFLYSKLTVDKSRWQQGNVFSCSVMHEALHNHYTQKSLSLSPGKGGSGGSGGSGGSGGSGGSGGSGGSGGSGGSGGSGGSGGSGGSGGSGGSGGSGGSGGSGGSAPTSSSTKKTQLQLEHLLLVLQMILNGINNYKNPKLTRMLTFKFYMPKKATELKHLQCLEEELKPLEEVLNLAQSKNFHLRPRDLISNINVIVLELKGSETTFMCEYADETATIVEFLNRWITFALSIISTLT

SEQ ID NO: 405 - protein, 439 aa, Artificial Sequence
  Synthetic polymer.
MKLPVRLLVLMFWIPASSSDKTHTCPPCPAPEAAGGPSVFLFPPKPKDTLMISRTPEVTCVVVDVSHEDPEVKFNWYVDGVEVHNAKTKPREEQYNSTYRVVSVLTVLHQDWLNGKEYKCQVSNKALPAPIEKTISKAKGQPREPQVYTLPPCRDELTKNQVSLWCLVKGFYPSDIAVEWESNGQPENNYKTTPPVLDSDGSFFLYSKLTVDKSRWQQGNVFSCSVMHEALHNHYTQKSLSLSPGKGGSGGSGGSGGSGGSGGSGGSGGSGGSGGSGGSGGSGGSGGSGGSGGSGGSGGSGGSGGSAPTSSSTKKTQLQLEHLLLVLQMILNGINNYKNPKLTRMLTFKFYMPKKATELKHLQCLEEELKPLEEVLNLAQSKNFHLRPRDLISNINVIVLELKGSETTFMCEYADETATIVEFLNRWITFAMSIISTLT

SEQ ID NO: 406 - protein, 439 aa, Artificial Sequence
  Synthetic polymer.
MKLPVRLLVLMFWIPASSSDKTHTCPPCPAPEAAGGPSVFLFPPKPKDTLMISRTPEVTCVVVDVSHEDPEVKFNWYVDGVEVHNAKTKPREEQYNSTYRVVSVLTVLHQDWLNGKEYKCQVSNKALPAPIEKTISKAKGQPREPQVYTLPPCRDELTKNQVSLWCLVKGFYPSDIAVEWESNGQPENNYKTTPPVLDSDGSFFLYSKLTVDKSRWQQGNVFSCSVMHEALHNHYTQKSLSLSPGKGGSGGSGGSGGSGGSGGSGGSGGSGGSGGSGGSGGSGGSGGSGGSGGSGGSGGSGGSGGSAPTSSSTKKTQLQLEHLLLVLQMILNGINNYKNPKLTRMLTFKFYMPKKATELKHLQCLEEELKPLEEVLNLAQSKNFHLRPRDLISNINVIVLELKGSETTFMCEYADETATIVEFLNRWITFANSIISTLT

SEQ ID NO: 407 - protein, 439 aa, Artificial Sequence
  Synthetic polymer.
MKLPVRLLVLMFWIPASSSDKTHTCPPCPAPEAAGGPSVFLFPPKPKDTLMISRTPEVTCVVVDVSHEDPEVKFNWYVDGVEVHNAKTKPREEQYNSTYRVVSVLTVLHQDWLNGKEYKCQVSNKALPAPIEKTISKAKGQPREPQVYTLPPCRDELTKNQVSLWCLVKGFYPSDIAVEWESNGQPENNYKTTPPVLDSDGSFFLYSKLTVDKSRWQQGNVFSCSVMHEALHNHYTQKSLSLSPGKGGSGGSGGSGGSGGSGGSGGSGGSGGSGGSGGSGGSGGSGGSGGSGGSGGSGGSGGSGGSAPTSSSTKKTQLQLEHLLLVLQMILNGINNYKNPKLTRMLTFKFYMPKKATELKHLQCLEEELKPLEEVLNLAQSKNFHLRPRDLISNINVIVLELKGSETTFMCEYADETATIVEFLNRWITFAPSIISTLT

SEQ ID NO: 408 - protein, 439 aa, Artificial Sequence
  Synthetic polymer.
MKLPVRLLVLMFWIPASSSDKTHTCPPCPAPEAAGGPSVFLFPPKPKDTLMISRTPEVTCVVVDVSHEDPEVKFNWYVDGVEVHNAKTKPREEQYNSTYRVVSVLTVLHQDWLNGKEYKCQVSNKALPAPIEKTISKAKGQPREPQVYTLPPCRDELTKNQVSLWCLVKGFYPSDIAVEWESNGQPENNYKTTPPVLDSDGSFFLYSKLTVDKSRWQQGNVFSCSVMHEALHNHYTQKSLSLSPGKGGSGGSGGSGGSGGSGGSGGSGGSGGSGGSGGSGGSGGSGGSGGSGGSGGSGGSGGSGGSAPTSSSTKKTQLQLEHLLLVLQMILNGINNYKNPKLTRMLTFKFYMPKKATELKHLQCLEEELKPLEEVLNLAQSKNFHLRPRDLISNINVIVLELKGSETTFMCEYADETATIVEFLNRWITFARSIISTLT

SEQ ID NO: 409 - protein, 439 aa, Artificial Sequence
  Synthetic polymer.
MKLPVRLLVLMFWIPASSSDKTHTCPPCPAPEAAGGPSVFLFPPKPKDTLMISRTPEVTCVVVDVSHEDPEVKFNWYVDGVEVHNAKTKPREEQYNSTYRVVSVLTVLHQDWLNGKEYKCQVSNKALPAPIEKTISKAKGQPREPQVYTLPPCRDELTKNQVSLWCLVKGFYPSDIAVEWESNGQPENNYKTTPPVLDSDGSFFLYSKLTVDKSRWQQGNVFSCSVMHEALHNHYTQKSLSLSPGKGGSGGSGGSGGSGGSGGSGGSGGSGGSGGSGGSGGSGGSGGSGGSGGSGGSGGSGGSGGSAPTSSSTKKTQLQLEHLLLVLQMILNGINNYKNPKLTRMLTFKFYMPKKATELKHLQCLEEELKPLEEVLNLAQSKNFHLRPRDLISNINVIVLELKGSETTFMCEYADETATIVEFLNRWITFASSIISTLT

SEQ ID NO: 410 - protein, 439 aa, Artificial Sequence
  Synthetic polymer.
MKLPVRLLVLMFWIPASSSDKTHTCPPCPAPEAAGGPSVFLFPPKPKDTLMISRTPEVTCVVVDVSHEDPEVKFNWYVDGVEVHNAKTKPREEQYNSTYRVVSVLTVLHQDWLNGKEYKCQVSNKALPAPIEKTISKAKGQPREPQVYTLPPCRDELTKNQVSLWCLVKGFYPSDIAVEWESNGQPENNYKTTPPVLDSDGSFFLYSKLTVDKSRWQQGNVFSCSVMHEALHNHYTQKSLSLSPGKGGSGGSGGSGGSGGSGGSGGSGGSGGSGGSGGSGGSGGSGGSGGSGGSGGSGGSGGSGGSAPTSSSTKKTQLQLEHLLLVLQMILNGINNYKNPKLTRMLTFKFYMPKKATELKHLQCLEEELKPLEEVLNLAQSKNFHLRPRDLISNINVIVLELKGSETTFMCEYADETATIVEFLNRWITFATSIISTLT

SEQ ID NO: 411 - protein, 439 aa, Artificial Sequence
  Synthetic polymer.
MKLPVRLLVLMFWIPASSSDKTHTCPPCPAPEAAGGPSVFLFPPKPKDTLMISRTPEVTCVVVDVSHEDPEVKFNWYVDGVEVHNAKTKPREEQYNSTYRVVSVLTVLHQDWLNGKEYKCQVSNKALPAPIEKTISKAKGQPREPQVYTLPPCRDELTKNQVSLWCLVKGFYPSDIAVEWESNGQPENNYKTTPPVLDSDGSFFLYSKLTVDKSRWQQGNVFSCSVMHEALHNHYTQKSLSLSPGKGGSGGSGGSGGSGGSGGSGGSGGSGGSGGSGGSGGSGGSGGSGGSGGSGGSGGSGGSGGSAPTSSSTKKTQLQLEHLLLVLQMILNGINNYKNPKLTRMLTFKFYMPKKATELKHLQCLEEELKPLEEVLNLAQSKNFHLRPRDLISNINVIVLELKGSETTFMCEYADETATIVEFLNRWITFAVSIISTLT

SEQ ID NO: 412 - protein, 439 aa, Artificial Sequence
  Synthetic polymer.
MKLPVRLLVLMFWIPASSSDKTHTCPPCPAPEAAGGPSVFLFPPKPKDTLMISRTPEVTCVVVDVSHEDPEVKFNWYVDGVEVHNAKTKPREEQYNSTYRVVSVLTVLHQDWLNGKEYKCQVSNKALPAPIEKTISKAKGQPREPQVYTLPPCRDELTKNQVSLWCLVKGFYPSDIAVEWESNGQPENNYKTTPPVLDSDGSFFLYSKLTVDKSRWQQGNVFSCSVMHEALHNHYTQKSLSLSPGKGGSGGSGGSGGSGGSGGSGGSGGSGGSGGSGGSGGSGGSGGSGGSGGSGGSGGSGGSGGSAPTSSSTKKTQLQLEHLLLVLQMILNGINNYKNPKLTRMLTFKFYMPKKATELKHLQCLEEELKPLEEVLNLAQSKNFHLRPRDLISNINVIVLELKGSETTFMCEYADETATIVEFLNRWITFAWSIISTLT

SEQ ID NO: 413 - protein, 439 aa, Artificial Sequence
  Synthetic polymer.
MKLPVRLLVLMFWIPASSSDKTHTCPPCPAPEAAGGPSVFLFPPKPKDTLMISRTPEVTCVVVDVSHEDPEVKFNWYVDGVEVHNAKTKPREEQYNSTYRVVSVLTVLHQDWLNGKEYKCQVSNKALPAPIEKTISKAKGQPREPQVYTLPPCRDELTKNQVSLWCLVKGFYPSDIAVEWESNGQPENNYKTTPPVLDSDGSFFLYSKLTVDKSRWQQGNVFSCSVMHEALHNHYTQKSLSLSPGKGGSGGSGGSGGSGGSGGSGGSGGSGGSGGSGGSGGSGGSGGSGGSGGSGGSGGSGGSGGSAPTSSSTKKTQLQLEHLLLVLQMILNGINNYKNPKLTRMLTFKFYMPKKATELKHLQCLEEELKPLEEVLNLAQSKNFHLRPRDLISNINVIVLELKGSETTFMCEYADETATIVEFLNRWITFAYSIISTLT

SEQ ID NO: 414 - protein, 439 aa, Artificial Sequence
  Synthetic polymer.
MKLPVRLLVLMFWIPASSSDKTHTCPPCPAPEAAGGPSVFLFPPKPKDTLMISRTPEVTCVVVDVSHEDPEVKFNWYVDGVEVHNAKTKPREEQYNSTYRVVSVLTVLHQDWLNGKEYKCQVSNKALPAPIEKTISKAKGQPREPQVYTLPPCRDELTKNQVSLWCLVKGFYPSDIAVEWESNGQPENNYKTTPPVLDSDGSFFLYSKLTVDKSRWQQGNVFSCSVMHEALHNHYTQKSLSLSPGKGGSGGSGGSGGSGGSGGSGGSGGSGGSGGSGGSGGSGGSGGSGGSGGSGGSGGSGGSGGSAPTSSSTKKTQLQLEHLLLDLQMILNGINNYKNPKLTRMLTFKFYMPKKATELKHLQCLEEELKPLEEVLNLAQSKNFHLRPRDLISAINVIVLELKGSETTFMCEYADETATIVEFLNRWITFAASIISTLT

SEQ ID NO: 415 - protein, 439 aa, Artificial Sequence
  Synthetic polymer.
MKLPVRLLVLMFWIPASSSDKTHTCPPCPAPEAAGGPSVFLFPPKPKDTLMISRTPEVTCVVVDVSHEDPEVKFNWYVDGVEVHNAKTKPREEQYNSTYRVVSVLTVLHQDWLNGKEYKCQVSNKALPAPIEKTISKAKGQPREPQVYTLPPCRDELTKNQVSLWCLVKGFYPSDIAVEWESNGQPENNYKTTPPVLDSDGSFFLYSKLTVDKSRWQQGNVFSCSVMHEALHNHYTQKSLSLSPGKGGSGGSGGSGGSGGSGGSGGSGGSGGSGGSGGSGGSGGSGGSGGSGGSGGSGGSGGSGGSAPTSSSTKKTQLQLEHLLLDLQMILNGINNYKNPKLTRMLTFKFYMPKKATELKHLQCLEEELKPLEEVLNLAQSKNFHLRPRDLISAINVIVLELKGSETTFMCEYADETATIVEFLNRWITFADSIISTLT

SEQ ID NO: 416 - protein, 439 aa, Artificial Sequence
  Synthetic polymer.
MKLPVRLLVLMFWIPASSSDKTHTCPPCPAPEAAGGPSVFLFPPKPKDTLMISRTPEVTCVVVDVSHEDPEVKFNWYVDGVEVHNAKTKPREEQYNSTYRVVSVLTVLHQDWLNGKEYKCQVSNKALPAPIEKTISKAKGQPREPQVYTLPPCRDELTKNQVSLWCLVKGFYPSDIAVEWESNGQPENNYKTTPPVLDSDGSFFLYSKLTVDKSRWQQGNVFSCSVMHEALHNHYTQKSLSLSPGKGGSGGSGGSGGSGGSGGSGGSGGSGGSGGSGGSGGSGGSGGSGGSGGSGGSGGSGGSGGSAPTSSSTKKTQLQLEHLLLDLQMILNGINNYKNPKLTRMLTFKFYMPKKATELKHLQCLEEELKPLEEVLNLAQSKNFHLRPRDLISAINVIVLELKGSETTFMCEYADETATIVEFLNRWITFAESIISTLT

SEQ ID NO: 417 - protein, 439 aa, Artificial Sequence
  Synthetic polymer.
MKLPVRLLVLMFWIPASSSDKTHTCPPCPAPEAAGGPSVFLFPPKPKDTLMISRTPEVTCVVVDVSHEDPEVKFNWYVDGVEVHNAKTKPREEQYNSTYRVVSVLTVLHQDWLNGKEYKCQVSNKALPAPIEKTISKAKGQPREPQVYTLPPCRDELTKNQVSLWCLVKGFYPSDIAVEWESNGQPENNYKTTPPVLDSDGSFFLYSKLTVDKSRWQQGNVFSCSVMHEALHNHYTQKSLSLSPGKGGSGGSGGSGGSGGSGGSGGSGGSGGSGGSGGSGGSGGSGGSGGSGGSGGSGGSGGSGGSAPTSSSTKKTQLQLEHLLLDLQMILNGINNYKNPKLTRMLTFKFYMPKKATELKHLQCLEEELKPLEEVLNLAQSKNFHLRPRDLISAINVIVLELKGSETTFMCEYADETATIVEFLNRWITFAFSIISTLT

SEQ ID NO: 418 - protein, 439 aa, Artificial Sequence
  Synthetic polymer.
MKLPVRLLVLMFWIPASSSDKTHTCPPCPAPEAAGGPSVFLFPPKPKDTLMISRTPEVTCVVVDVSHEDPEVKFNWYVDGVEVHNAKTKPREEQYNSTYRVVSVLTVLHQDWLNGKEYKCQVSNKALPAPIEKTISKAKGQPREPQVYTLPPCRDELTKNQVSLWCLVKGFYPSDIAVEWESNGQPENNYKTTPPVLDSDGSFFLYSKLTVDKSRWQQGNVFSCSVMHEALHNHYTQKSLSLSPGKGGSGGSGGSGGSGGSGGSGGSGGSGGSGGSGGSGGSGGSGGSGGSGGSGGSGGSGGSGGSAPTSSSTKKTQLQLEHLLLDLQMILNGINNYKNPKLTRMLTFKFYMPKKATELKHLQCLEEELKPLEEVLNLAQSKNFHLRPRDLISAINVIVLELKGSETTFMCEYADETATIVEFLNRWITFAGSIISTLT

SEQ ID NO: 419 - protein, 439 aa, Artificial Sequence
  Synthetic polymer.
MKLPVRLLVLMFWIPASSSDKTHTCPPCPAPEAAGGPSVFLFPPKPKDTLMISRTPEVTCVVVDVSHEDPEVKFNWYVDGVEVHNAKTKPREEQYNSTYRVVSVLTVLHQDWLNGKEYKCQVSNKALPAPIEKTISKAKGQPREPQVYTLPPCRDELTKNQVSLWCLVKGFYPSDIAVEWESNGQPENNYKTTPPVLDSDGSFFLYSKLTVDKSRWQQGNVFSCSVMHEALHNHYTQKSLSLSPGKGGSGGSGGSGGSGGSGGSGGSGGSGGSGGSGGSGGSGGSGGSGGSGGSGGSGGSGGSGGSAPTSSSTKKTQLQLEHLLLDLQMILNGINNYKNPKLTRMLTFKFYMPKKATELKHLQCLEEELKPLEEVLNLAQSKNFHLRPRDLISAINVIVLELKGSETTFMCEYADETATIVEFLNRWITFAHSIISTLT

SEQ ID NO: 420 - protein, 439 aa, Artificial Sequence
  Synthetic polymer.
MKLPVRLLVLMFWIPASSSDKTHTCPPCPAPEAAGGPSVFLFPPKPKDTLMISRTPEVTCVVVDVSHEDPEVKFNWYVDGVEVHNAKTKPREEQYNSTYRVVSVLTVLHQDWLNGKEYKCQVSNKALPAPIEKTISKAKGQPREPQVYTLPPCRDELTKNQVSLWCLVKGFYPSDIAVEWESNGQPENNYKTTPPVLDSDGSFFLYSKLTVDKSRWQQGNVFSCSVMHEALHNHYTQKSLSLSPGKGGSGGSGGSGGSGGSGGSGGSGGSGGSGGSGGSGGSGGSGGSGGSGGSGGSGGSGGSGGSAPTSSSTKKTQLQLEHLLLDLQMILNGINNYKNPKLTRMLTFKFYMPKKATELKHLQCLEEELKPLEEVLNLAQSKNFHLRPRDLISAINVIVLELKGSETTFMCEYADETATIVEFLNRWITFAISIISTLT

SEQ ID NO: 421 - protein, 439 aa, Artificial Sequence
  Synthetic polymer.
MKLPVRLLVLMFWIPASSSDKTHTCPPCPAPEAAGGPSVFLFPPKPKDTLMISRTPEVTCVVVDVSHEDPEVKFNWYVDGVEVHNAKTKPREEQYNSTYRVVSVLTVLHQDWLNGKEYKCQVSNKALPAPIEKTISKAKGQPREPQVYTLPPCRDELTKNQVSLWCLVKGFYPSDIAVEWESNGQPENNYKTTPPVLDSDGSFFLYSKLTVDKSRWQQGNVFSCSVMHEALHNHYTQKSLSLSPGKGGSGGSGGSGGSGGSGGSGGSGGSGGSGGSGGSGGSGGSGGSGGSGGSGGSGGSGGSGGSAPTSSSTKKTQLQLEHLLLDLQMILNGINNYKNPKLTRMLTFKFYMPKKATELKHLQCLEEELKPLEEVLNLAQSKNFHLRPRDLISAINVIVLELKGSETTFMCEYADETATIVEFLNRWITFAKSIISTLT

SEQ ID NO: 422 - protein, 439 aa, Artificial Sequence
  Synthetic polymer.
MKLPVRLLVLMFWIPASSSDKTHTCPPCPAPEAAGGPSVFLFPPKPKDTLMISRTPEVTCVVVDVSHEDPEVKFNWYVDGVEVHNAKTKPREEQYNSTYRVVSVLTVLHQDWLNGKEYKCQVSNKALPAPIEKTISKAKGQPREPQVYTLPPCRDELTKNQVSLWCLVKGFYPSDIAVEWESNGQPENNYKTTPPVLDSDGSFFLYSKLTVDKSRWQQGNVFSCSVMHEALHNHYTQKSLSLSPGKGGSGGSGGSGGSGGSGGSGGSGGSGGSGGSGGSGGSGGSGGSGGSGGSGGSGGSGGSGGSAPTSSSTKKTQLQLEHLLLDLQMILNGINNYKNPKLTRMLTFKFYMPKKATELKHLQCLEEELKPLEEVLNLAQSKNFHLRPRDLISAINVIVLELKGSETTFMCEYADETATIVEFLNRWITFALSIISTLT

SEQ ID NO: 423 - protein, 439 aa, Artificial Sequence
  Synthetic polymer.
MKLPVRLLVLMFWIPASSSDKTHTCPPCPAPEAAGGPSVFLFPPKPKDTLMISRTPEVTCVVVDVSHEDPEVKFNWYVDGVEVHNAKTKPREEQYNSTYRVVSVLTVLHQDWLNGKEYKCQVSNKALPAPIEKTISKAKGQPREPQVYTLPPCRDELTKNQVSLWCLVKGFYPSDIAVEWESNGQPENNYKTTPPVLDSDGSFFLYSKLTVDKSRWQQGNVFSCSVMHEALHNHYTQKSLSLSPGKGGSGGSGGSGGSGGSGGSGGSGGSGGSGGSGGSGGSGGSGGSGGSGGSGGSGGSGGSGGSAPTSSSTKKTQLQLEHLLLDLQMILNGINNYKNPKLTRMLTFKFYMPKKATELKHLQCLEEELKPLEEVLNLAQSKNFHLRPRDLISAINVIVLELKGSETTFMCEYADETATIVEFLNRWITFAMSIISTLT

SEQ ID NO: 424 - protein, 439 aa, Artificial Sequence
  Synthetic polymer.
MKLPVRLLVLMFWIPASSSDKTHTCPPCPAPEAAGGPSVFLFPPKPKDTLMISRTPEVTCVVVDVSHEDPEVKFNWYVDGVEVHNAKTKPREEQYNSTYRVVSVLTVLHQDWLNGKEYKCQVSNKALPAPIEKTISKAKGQPREPQVYTLPPCRDELTKNQVSLWCLVKGFYPSDIAVEWESNGQPENNYKTTPPVLDSDGSFFLYSKLTVDKSRWQQGNVFSCSVMHEALHNHYTQKSLSLSPGKGGSGGSGGSGGSGGSGGSGGSGGSGGSGGSGGSGGSGGSGGSGGSGGSGGSGGSGGSGGSAPTSSSTKKTQLQLEHLLLDLQMILNGINNYKNPKLTRMLTFKFYMPKKATELKHLQCLEEELKPLEEVLNLAQSKNFHLRPRDLISAINVIVLELKGSETTFMCEYADETATIVEFLNRWITFANSIISTLT

SEQ ID NO: 425 - protein, 439 aa, Artificial Sequence
  Synthetic polymer.
MKLPVRLLVLMFWIPASSSDKTHTCPPCPAPEAAGGPSVFLFPPKPKDTLMISRTPEVTCVVVDVSHEDPEVKFNWYVDGVEVHNAKTKPREEQYNSTYRVVSVLTVLHQDWLNGKEYKCQVSNKALPAPIEKTISKAKGQPREPQVYTLPPCRDELTKNQVSLWCLVKGFYPSDIAVEWESNGQPENNYKTTPPVLDSDGSFFLYSKLTVDKSRWQQGNVFSCSVMHEALHNHYTQKSLSLSPGKGGSGGSGGSGGSGGSGGSGGSGGSGGSGGSGGSGGSGGSGGSGGSGGSGGSGGSGGSGGSAPTSSSTKKTQLQLEHLLLDLQMILNGINNYKNPKLTRMLTFKFYMPKKATELKHLQCLEEELKPLEEVLNLAQSKNFHLRPRDLISAINVIVLELKGSETTFMCEYADETATIVEFLNRWITFAPSIISTLT

SEQ ID NO: 426 - protein, 439 aa, Artificial Sequence
  Synthetic polymer.
MKLPVRLLVLMFWIPASSSDKTHTCPPCPAPEAAGGPSVFLFPPKPKDTLMISRTPEVTCVVVDVSHEDPEVKFNWYVDGVEVHNAKTKPREEQYNSTYRVVSVLTVLHQDWLNGKEYKCQVSNKALPAPIEKTISKAKGQPREPQVYTLPPCRDELTKNQVSLWCLVKGFYPSDIAVEWESNGQPENNYKTTPPVLDSDGSFFLYSKLTVDKSRWQQGNVFSCSVMHEALHNHYTQKSLSLSPGKGGSGGSGGSGGSGGSGGSGGSGGSGGSGGSGGSGGSGGSGGSGGSGGSGGSGGSGGSGGSAPTSSSTKKTQLQLEHLLLDLQMILNGINNYKNPKLTRMLTFKFYMPKKATELKHLQCLEEELKPLEEVLNLAQSKNFHLRPRDLISAINVIVLELKGSETTFMCEYADETATIVEFLNRWITFARSIISTLT

SEQ ID NO: 427 - protein, 439 aa, Artificial Sequence
  Synthetic polymer.
MKLPVRLLVLMFWIPASSSDKTHTCPPCPAPEAAGGPSVFLFPPKPKDTLMISRTPEVTCVVVDVSHEDPEVKFNWYVDGVEVHNAKTKPREEQYNSTYRVVSVLTVLHQDWLNGKEYKCQVSNKALPAPIEKTISKAKGQPREPQVYTLPPCRDELTKNQVSLWCLVKGFYPSDIAVEWESNGQPENNYKTTPPVLDSDGSFFLYSKLTVDKSRWQQGNVFSCSVMHEALHNHYTQKSLSLSPGKGGSGGSGGSGGSGGSGGSGGSGGSGGSGGSGGSGGSGGSGGSGGSGGSGGSGGSGGSGGSAPTSSSTKKTQLQLEHLLLDLQMILNGINNYKNPKLTRMLTFKFYMPKKATELKHLQCLEEELKPLEEVLNLAQSKNFHLRPRDLISAINVIVLELKGSETTFMCEYADETATIVEFLNRWITFASSIISTLT

SEQ ID NO: 428 - protein, 439 aa, Artificial Sequence
  Synthetic polymer.
MKLPVRLLVLMFWIPASSSDKTHTCPPCPAPEAAGGPSVFLFPPKPKDTLMISRTPEVTCVVVDVSHEDPEVKFNWYVDGVEVHNAKTKPREEQYNSTYRVVSVLTVLHQDWLNGKEYKCQVSNKALPAPIEKTISKAKGQPREPQVYTLPPCRDELTKNQVSLWCLVKGFYPSDIAVEWESNGQPENNYKTTPPVLDSDGSFFLYSKLTVDKSRWQQGNVFSCSVMHEALHNHYTQKSLSLSPGKGGSGGSGGSGGSGGSGGSGGSGGSGGSGGSGGSGGSGGSGGSGGSGGSGGSGGSGGSGGSAPTSSSTKKTQLQLEHLLLDLQMILNGINNYKNPKLTRMLTFKFYMPKKATELKHLQCLEEELKPLEEVLNLAQSKNFHLRPRDLISAINVIVLELKGSETTFMCEYADETATIVEFLNRWITFATSIISTLT

SEQ ID NO: 429 - protein, 439 aa, Artificial Sequence
  Synthetic polymer.
MKLPVRLLVLMFWIPASSSDKTHTCPPCPAPEAAGGPSVFLFPPKPKDTLMISRTPEVTCVVVDVSHEDPEVKFNWYVDGVEVHNAKTKPREEQYNSTYRVVSVLTVLHQDWLNGKEYKCQVSNKALPAPIEKTISKAKGQPREPQVYTLPPCRDELTKNQVSLWCLVKGFYPSDIAVEWESNGQPENNYKTTPPVLDSDGSFFLYSKLTVDKSRWQQGNVFSCSVMHEALHNHYTQKSLSLSPGKGGSGGSGGSGGSGGSGGSGGSGGSGGSGGSGGSGGSGGSGGSGGSGGSGGSGGSGGSGGSAPTSSSTKKTQLQLEHLLLDLQMILNGINNYKNPKLTRMLTFKFYMPKKATELKHLQCLEEELKPLEEVLNLAQSKNFHLRPRDLISAINVIVLELKGSETTFMCEYADETATIVEFLNRWITFAVSIISTLT

SEQ ID NO: 430 - protein, 439 aa, Artificial Sequence
  Synthetic polymer.
MKLPVRLLVLMFWIPASSSDKTHTCPPCPAPEAAGGPSVFLFPPKPKDTLMISRTPEVTCVVVDVSHEDPEVKFNWYVDGVEVHNAKTKPREEQYNSTYRVVSVLTVLHQDWLNGKEYKCQVSNKALPAPIEKTISKAKGQPREPQVYTLPPCRDELTKNQVSLWCLVKGFYPSDIAVEWESNGQPENNYKTTPPVLDSDGSFFLYSKLTVDKSRWQQGNVFSCSVMHEALHNHYTQKSLSLSPGKGGSGGSGGSGGSGGSGGSGGSGGSGGSGGSGGSGGSGGSGGSGGSGGSGGSGGSGGSGGSAPTSSSTKKTQLQLEHLLLDLQMILNGINNYKNPKLTRMLTFKFYMPKKATELKHLQCLEEELKPLEEVLNLAQSKNFHLRPRDLISAINVIVLELKGSETTFMCEYADETATIVEFLNRWITFAWSIISTLT

SEQ ID NO: 431 - protein, 439 aa, Artificial Sequence
  Synthetic polymer.
MKLPVRLLVLMFWIPASSSDKTHTCPPCPAPEAAGGPSVFLFPPKPKDTLMISRTPEVTCVVVDVSHEDPEVKFNWYVDGVEVHNAKTKPREEQYNSTYRVVSVLTVLHQDWLNGKEYKCQVSNKALPAPIEKTISKAKGQPREPQVYTLPPCRDELTKNQVSLWCLVKGFYPSDIAVEWESNGQPENNYKTTPPVLDSDGSFFLYSKLTVDKSRWQQGNVFSCSVMHEALHNHYTQKSLSLSPGKGGSGGSGGSGGSGGSGGSGGSGGSGGSGGSGGSGGSGGSGGSGGSGGSGGSGGSGGSGGSAPTSSSTKKTQLQLEHLLLDLQMILNGINNYKNPKLTRMLTFKFYMPKKATELKHLQCLEEELKPLEEVLNLAQSKNFHLRPRDLISAINVIVLELKGSETTFMCEYADETATIVEFLNRWITFAYSIISTLT

SEQ ID NO: 432 - protein, 439 aa, Artificial Sequence
  Synthetic polymer.
MKLPVRLLVLMFWIPASSSDKTHTCPPCPAPEAAGGPSVFLFPPKPKDTLMISRTPEVTCVVVDVSHEDPEVKFNWYVDGVEVHNAKTKPREEQYNSTYRVVSVLTVLHQDWLNGKEYKCQVSNKALPAPIEKTISKAKGQPREPQVYTLPPCRDELTKNQVSLWCLVKGFYPSDIAVEWESNGQPENNYKTTPPVLDSDGSFFLYSKLTVDKSRWQQGNVFSCSVMHEALHNHYTQKSLSLSPGKGGSGGSGGSGGSGGSGGSGGSGGSGGSGGSGGSGGSGGSGGSGGSGGSGGSGGSGGSGGSAPTSSSTKKTQLQLEHLLLDLQMILNGINNYKNPKLTRMLTFKFYMPKKATELKHLQCLEEELKPLEEVLNLAQSKNFHLRPRDLISGINVIVLELKGSETTFMCEYADETATIVEFLNRWITFAASIISTLT

SEQ ID NO: 433 - protein, 439 aa, Artificial Sequence
  Synthetic polymer.
MKLPVRLLVLMFWIPASSSDKTHTCPPCPAPEAAGGPSVFLFPPKPKDTLMISRTPEVTCVVVDVSHEDPEVKFNWYVDGVEVHNAKTKPREEQYNSTYRVVSVLTVLHQDWLNGKEYKCQVSNKALPAPIEKTISKAKGQPREPQVYTLPPCRDELTKNQVSLWCLVKGFYPSDIAVEWESNGQPENNYKTTPPVLDSDGSFFLYSKLTVDKSRWQQGNVFSCSVMHEALHNHYTQKSLSLSPGKGGSGGSGGSGGSGGSGGSGGSGGSGGSGGSGGSGGSGGSGGSGGSGGSGGSGGSGGSGGSAPTSSSTKKTQLQLEHLLLDLQMILNGINNYKNPKLTRMLTFKFYMPKKATELKHLQCLEEELKPLEEVLNLAQSKNFHLRPRDLISGINVIVLELKGSETTFMCEYADETATIVEFLNRWITFADSIISTLT

SEQ ID NO: 434 - protein, 439 aa, Artificial Sequence
  Synthetic polymer.
MKLPVRLLVLMFWIPASSSDKTHTCPPCPAPEAAGGPSVFLFPPKPKDTLMISRTPEVTCVVVDVSHEDPEVKFNWYVDGVEVHNAKTKPREEQYNSTYRVVSVLTVLHQDWLNGKEYKCQVSNKALPAPIEKTISKAKGQPREPQVYTLPPCRDELTKNQVSLWCLVKGFYPSDIAVEWESNGQPENNYKTTPPVLDSDGSFFLYSKLTVDKSRWQQGNVFSCSVMHEALHNHYTQKSLSLSPGKGGSGGSGGSGGSGGSGGSGGSGGSGGSGGSGGSGGSGGSGGSGGSGGSGGSGGSGGSGGSAPTSSSTKKTQLQLEHLLLDLQMILNGINNYKNPKLTRMLTFKFYMPKKATELKHLQCLEEELKPLEEVLNLAQSKNFHLRPRDLISGINVIVLELKGSETTFMCEYADETATIVEFLNRWITFAESIISTLT

SEQ ID NO: 435 - protein, 439 aa, Artificial Sequence
  Synthetic polymer.
MKLPVRLLVLMFWIPASSSDKTHTCPPCPAPEAAGGPSVFLFPPKPKDTLMISRTPEVTCVVVDVSHEDPEVKFNWYVDGVEVHNAKTKPREEQYNSTYRVVSVLTVLHQDWLNGKEYKCQVSNKALPAPIEKTISKAKGQPREPQVYTLPPCRDELTKNQVSLWCLVKGFYPSDIAVEWESNGQPENNYKTTPPVLDSDGSFFLYSKLTVDKSRWQQGNVFSCSVMHEALHNHYTQKSLSLSPGKGGSGGSGGSGGSGGSGGSGGSGGSGGSGGSGGSGGSGGSGGSGGSGGSGGSGGSGGSGGSAPTSSSTKKTQLQLEHLLLDLQMILNGINNYKNPKLTRMLTFKFYMPKKATELKHLQCLEEELKPLEEVLNLAQSKNFHLRPRDLISGINVIVLELKGSETTFMCEYADETATIVEFLNRWITFAFSIISTLT

SEQ ID NO: 436 - protein, 439 aa, Artificial Sequence
  Synthetic polymer.
MKLPVRLLVLMFWIPASSSDKTHTCPPCPAPEAAGGPSVFLFPPKPKDTLMISRTPEVTCVVVDVSHEDPEVKFNWYVDGVEVHNAKTKPREEQYNSTYRVVSVLTVLHQDWLNGKEYKCQVSNKALPAPIEKTISKAKGQPREPQVYTLPPCRDELTKNQVSLWCLVKGFYPSDIAVEWESNGQPENNYKTTPPVLDSDGSFFLYSKLTVDKSRWQQGNVFSCSVMHEALHNHYTQKSLSLSPGKGGSGGSGGSGGSGGSGGSGGSGGSGGSGGSGGSGGSGGSGGSGGSGGSGGSGGSGGSGGSAPTSSSTKKTQLQLEHLLLDLQMILNGINNYKNPKLTRMLTFKFYMPKKATELKHLQCLEEELKPLEEVLNLAQSKNFHLRPRDLISGINVIVLELKGSETTFMCEYADETATIVEFLNRWITFAGSIISTLT

SEQ ID NO: 437 - protein, 439 aa, Artificial Sequence
  Synthetic polymer.
MKLPVRLLVLMFWIPASSSDKTHTCPPCPAPEAAGGPSVFLFPPKPKDTLMISRTPEVTCVVVDVSHEDPEVKFNWYVDGVEVHNAKTKPREEQYNSTYRVVSVLTVLHQDWLNGKEYKCQVSNKALPAPIEKTISKAKGQPREPQVYTLPPCRDELTKNQVSLWCLVKGFYPSDIAVEWESNGQPENNYKTTPPVLDSDGSFFLYSKLTVDKSRWQQGNVFSCSVMHEALHNHYTQKSLSLSPGKGGSGGSGGSGGSGGSGGSGGSGGSGGSGGSGGSGGSGGSGGSGGSGGSGGSGGSGGSGGSAPTSSSTKKTQLQLEHLLLDLQMILNGINNYKNPKLTRMLTFKFYMPKKATELKHLQCLEEELKPLEEVLNLAQSKNFHLRPRDLISGINVIVLELKGSETTFMCEYADETATIVEFLNRWITFAHSIISTLT

SEQ ID NO: 438 - protein, 439 aa, Artificial Sequence
  Synthetic polymer.
MKLPVRLLVLMFWIPASSSDKTHTCPPCPAPEAAGGPSVFLFPPKPKDTLMISRTPEVTCVVVDVSHEDPEVKFNWYVDGVEVHNAKTKPREEQYNSTYRVVSVLTVLHQDWLNGKEYKCQVSNKALPAPIEKTISKAKGQPREPQVYTLPPCRDELTKNQVSLWCLVKGFYPSDIAVEWESNGQPENNYKTTPPVLDSDGSFFLYSKLTVDKSRWQQGNVFSCSVMHEALHNHYTQKSLSLSPGKGGSGGSGGSGGSGGSGGSGGSGGSGGSGGSGGSGGSGGSGGSGGSGGSGGSGGSGGSGGSAPTSSSTKKTQLQLEHLLLDLQMILNGINNYKNPKLTRMLTFKFYMPKKATELKHLQCLEEELKPLEEVLNLAQSKNFHLRPRDLISGINVIVLELKGSETTFMCEYADETATIVEFLNRWITFAISIISTLT

SEQ ID NO: 439 - protein, 439 aa, Artificial Sequence
  Synthetic polymer.
MKLPVRLLVLMFWIPASSSDKTHTCPPCPAPEAAGGPSVFLFPPKPKDTLMISRTPEVTCVVVDVSHEDPEVKFNWYVDGVEVHNAKTKPREEQYNSTYRVVSVLTVLHQDWLNGKEYKCQVSNKALPAPIEKTISKAKGQPREPQVYTLPPCRDELTKNQVSLWCLVKGFYPSDIAVEWESNGQPENNYKTTPPVLDSDGSFFLYSKLTVDKSRWQQGNVFSCSVMHEALHNHYTQKSLSLSPGKGGSGGSGGSGGSGGSGGSGGSGGSGGSGGSGGSGGSGGSGGSGGSGGSGGSGGSGGSGGSAPTSSSTKKTQLQLEHLLLDLQMILNGINNYKNPKLTRMLTFKFYMPKKATELKHLQCLEEELKPLEEVLNLAQSKNFHLRPRDLISGINVIVLELKGSETTFMCEYADETATIVEFLNRWITFAKSIISTLT

SEQ ID NO: 440 - protein, 439 aa, Artificial Sequence
  Synthetic polymer.
MKLPVRLLVLMFWIPASSSDKTHTCPPCPAPEAAGGPSVFLFPPKPKDTLMISRTPEVTCVVVDVSHEDPEVKFNWYVDGVEVHNAKTKPREEQYNSTYRVVSVLTVLHQDWLNGKEYKCQVSNKALPAPIEKTISKAKGQPREPQVYTLPPCRDELTKNQVSLWCLVKGFYPSDIAVEWESNGQPENNYKTTPPVLDSDGSFFLYSKLTVDKSRWQQGNVFSCSVMHEALHNHYTQKSLSLSPGKGGSGGSGGSGGSGGSGGSGGSGGSGGSGGSGGSGGSGGSGGSGGSGGSGGSGGSGGSGGSAPTSSSTKKTQLQLEHLLLDLQMILNGINNYKNPKLTRMLTFKFYMPKKATELKHLQCLEEELKPLEEVLNLAQSKNFHLRPRDLISGINVIVLELKGSETTFMCEYADETATIVEFLNRWITFALSIISTLT

SEQ ID NO: 441 - protein, 439 aa, Artificial Sequence
  Synthetic polymer.
MKLPVRLLVLMFWIPASSSDKTHTCPPCPAPEAAGGPSVFLFPPKPKDTLMISRTPEVTCVVVDVSHEDPEVKFNWYVDGVEVHNAKTKPREEQYNSTYRVVSVLTVLHQDWLNGKEYKCQVSNKALPAPIEKTISKAKGQPREPQVYTLPPCRDELTKNQVSLWCLVKGFYPSDIAVEWESNGQPENNYKTTPPVLDSDGSFFLYSKLTVDKSRWQQGNVFSCSVMHEALHNHYTQKSLSLSPGKGGSGGSGGSGGSGGSGGSGGSGGSGGSGGSGGSGGSGGSGGSGGSGGSGGSGGSGGSGGSAPTSSSTKKTQLQLEHLLLDLQMILNGINNYKNPKLTRMLTFKFYMPKKATELKHLQCLEEELKPLEEVLNLAQSKNFHLRPRDLISGINVIVLELKGSETTFMCEYADETATIVEFLNRWITFAMSIISTLT

SEQ ID NO: 442 - protein, 439 aa, Artificial Sequence
  Synthetic polymer.
MKLPVRLLVLMFWIPASSSDKTHTCPPCPAPEAAGGPSVFLFPPKPKDTLMISRTPEVTCVVVDVSHEDPEVKFNWYVDGVEVHNAKTKPREEQYNSTYRVVSVLTVLHQDWLNGKEYKCQVSNKALPAPIEKTISKAKGQPREPQVYTLPPCRDELTKNQVSLWCLVKGFYPSDIAVEWESNGQPENNYKTTPPVLDSDGSFFLYSKLTVDKSRWQQGNVFSCSVMHEALHNHYTQKSLSLSPGKGGSGGSGGSGGSGGSGGSGGSGGSGGSGGSGGSGGSGGSGGSGGSGGSGGSGGSGGSGGSAPTSSSTKKTQLQLEHLLLDLQMILNGINNYKNPKLTRMLTFKFYMPKKATELKHLQCLEEELKPLEEVLNLAQSKNFHLRPRDLISGINVIVLELKGSETTFMCEYADETATIVEFLNRWITFANSIISTLT

SEQ ID NO: 443 - protein, 439 aa, Artificial Sequence
  Synthetic polymer.
MKLPVRLLVLMFWIPASSSDKTHTCPPCPAPEAAGGPSVFLFPPKPKDTLMISRTPEVTCVVVDVSHEDPEVKFNWYVDGVEVHNAKTKPREEQYNSTYRVVSVLTVLHQDWLNGKEYKCQVSNKALPAPIEKTISKAKGQPREPQVYTLPPCRDELTKNQVSLWCLVKGFYPSDIAVEWESNGQPENNYKTTPPVLDSDGSFFLYSKLTVDKSRWQQGNVFSCSVMHEALHNHYTQKSLSLSPGKGGSGGSGGSGGSGGSGGSGGSGGSGGSGGSGGSGGSGGSGGSGGSGGSGGSGGSGGSGGSAPTSSSTKKTQLQLEHLLLDLQMILNGINNYKNPKLTRMLTFKFYMPKKATELKHLQCLEEELKPLEEVLNLAQSKNFHLRPRDLISGINVIVLELKGSETTFMCEYADETATIVEFLNRWITFAPSIISTLT

SEQ ID NO: 444 - protein, 439 aa, Artificial Sequence
  Synthetic polymer.
MKLPVRLLVLMFWIPASSSDKTHTCPPCPAPEAAGGPSVFLFPPKPKDTLMISRTPEVTCVVVDVSHEDPEVKFNWYVDGVEVHNAKTKPREEQYNSTYRVVSVLTVLHQDWLNGKEYKCQVSNKALPAPIEKTISKAKGQPREPQVYTLPPCRDELTKNQVSLWCLVKGFYPSDIAVEWESNGQPENNYKTTPPVLDSDGSFFLYSKLTVDKSRWQQGNVFSCSVMHEALHNHYTQKSLSLSPGKGGSGGSGGSGGSGGSGGSGGSGGSGGSGGSGGSGGSGGSGGSGGSGGSGGSGGSGGSGGSAPTSSSTKKTQLQLEHLLLDLQMILNGINNYKNPKLTRMLTFKFYMPKKATELKHLQCLEEELKPLEEVLNLAQSKNFHLRPRDLISGINVIVLELKGSETTFMCEYADETATIVEFLNRWITFARSIISTLT

SEQ ID NO: 445 - protein, 439 aa, Artificial Sequence
  Synthetic polymer.
MKLPVRLLVLMFWIPASSSDKTHTCPPCPAPEAAGGPSVFLFPPKPKDTLMISRTPEVTCVVVDVSHEDPEVKFNWYVDGVEVHNAKTKPREEQYNSTYRVVSVLTVLHQDWLNGKEYKCQVSNKALPAPIEKTISKAKGQPREPQVYTLPPCRDELTKNQVSLWCLVKGFYPSDIAVEWESNGQPENNYKTTPPVLDSDGSFFLYSKLTVDKSRWQQGNVFSCSVMHEALHNHYTQKSLSLSPGKGGSGGSGGSGGSGGSGGSGGSGGSGGSGGSGGSGGSGGSGGSGGSGGSGGSGGSGGSGGSAPTSSSTKKTQLQLEHLLLDLQMILNGINNYKNPKLTRMLTFKFYMPKKATELKHLQCLEEELKPLEEVLNLAQSKNFHLRPRDLISGINVIVLELKGSETTFMCEYADETATIVEFLNRWITFASSIISTLT

SEQ ID NO: 446 - protein, 439 aa, Artificial Sequence; identical to SEQ ID NO: 436
  Synthetic polymer.

SEQ ID NO: 447 - protein, 439 aa, Artificial Sequence
  Synthetic polymer.
MKLPVRLLVLMFWIPASSSDKTHTCPPCPAPEAAGGPSVFLFPPKPKDTLMISRTPEVTCVVVDVSHEDPEVKFNWYVDGVEVHNAKTKPREEQYNSTYRVVSVLTVLHQDWLNGKEYKCQVSNKALPAPIEKTISKAKGQPREPQVYTLPPCRDELTKNQVSLWCLVKGFYPSDIAVEWESNGQPENNYKTTPPVLDSDGSFFLYSKLTVDKSRWQQGNVFSCSVMHEALHNHYTQKSLSLSPGKGGSGGSGGSGGSGGSGGSGGSGGSGGSGGSGGSGGSGGSGGSGGSGGSGGSGGSGGSGGSAPTSSSTKKTQLQLEHLLLDLQMILNGINNYKNPKLTRMLTFKFYMPKKATELKHLQCLEEELKPLEEVLNLAQSKNFHLRPRDLISGINVIVLELKGSETTFMCEYADETATIVEFLNRWITFAVSIISTLT

SEQ ID NO: 448 - protein, 439 aa, Artificial Sequence
  Synthetic polymer.
MKLPVRLLVLMFWIPASSSDKTHTCPPCPAPEAAGGPSVFLFPPKPKDTLMISRTPEVTCVVVDVSHEDPEVKFNWYVDGVEVHNAKTKPREEQYNSTYRVVSVLTVLHQDWLNGKEYKCQVSNKALPAPIEKTISKAKGQPREPQVYTLPPCRDELTKNQVSLWCLVKGFYPSDIAVEWESNGQPENNYKTTPPVLDSDGSFFLYSKLTVDKSRWQQGNVFSCSVMHEALHNHYTQKSLSLSPGKGGSGGSGGSGGSGGSGGSGGSGGSGGSGGSGGSGGSGGSGGSGGSGGSGGSGGSGGSGGSAPTSSSTKKTQLQLEHLLLDLQMILNGINNYKNPKLTRMLTFKFYMPKKATELKHLQCLEEELKPLEEVLNLAQSKNFHLRPRDLISGINVIVLELKGSETTFMCEYADETATIVEFLNRWITFAWSIISTLT

SEQ ID NO: 449 - protein, 439 aa, Artificial Sequence
  Synthetic polymer.
MKLPVRLLVLMFWIPASSSDKTHTCPPCPAPEAAGGPSVFLFPPKPKDTLMISRTPEVTCVVVDVSHEDPEVKFNWYVDGVEVHNAKTKPREEQYNSTYRVVSVLTVLHQDWLNGKEYKCQVSNKALPAPIEKTISKAKGQPREPQVYTLPPCRDELTKNQVSLWCLVKGFYPSDIAVEWESNGQPENNYKTTPPVLDSDGSFFLYSKLTVDKSRWQQGNVFSCSVMHEALHNHYTQKSLSLSPGKGGSGGSGGSGGSGGSGGSGGSGGSGGSGGSGGSGGSGGSGGSGGSGGSGGSGGSGGSGGSAPTSSSTKKTQLQLEHLLLDLQMILNGINNYKNPKLTRMLTFKFYMPKKATELKHLQCLEEELKPLEEVLNLAQSKNFHLRPRDLISGINVIVLELKGSETTFMCEYADETATIVEFLNRWITFAYSIISTLT

SEQ ID NO: 450 - protein, 166 aa, Artificial Sequence
  Synthetic polymer.
CDLPETHSLDNRRTLMLLAQMSRISPSSCLMDRHDFGFPQEEFDGNQFQKAPAISVLHELIQQIFNLFTTKDSSAAWDEDLLDKFCTELYQQLNDLEACVMQEERVGETPLMNADSILAVKKYFRRITLYLTEKKYSPCAWEVVRAEIMRSLSLSTNLQERLRRKE

SEQ ID NO: 451 - protein, 9 aa, Artificial Sequence
  Synthetic polymer.
DKTHTCPPC

SEQ ID NO: 452 - protein, 14 aa, Artificial Sequence
  Synthetic polymer.
EPKSCDKTHTCPPC

SEQ ID NO: 453 - protein, 14 aa, Artificial Sequence
  Synthetic polymer.
EPKSSDKTHTCPPC

SEQ ID NO: 454 - protein, 125 aa, Artificial Sequence
  Synthetic polymer.
EVQLVESGGGLVQPGGSLRLSCAASGFTFEDYAIGWFRQAPGKGREGVACIRIFDRHTYYADSVKGRFTISSDNSKNTVYLQMNSLRAEDTATYYCAAGSFFGCTRPEGDMDYFGQGTLVQVQSA

SEQ ID NO: 455 - protein, 125 aa, Artificial Sequence
  Synthetic polymer.
EVQLVESGGGLVQPGGSLRLSCAASGFTFDDYVIGWFRQAPGKGREGVACIRIFDRHTYYADSVKGRFTISSDNSKNTVYLQMNSLRAEDTATYYCAAGSFFGCTRPEGDMDYFGQGTLVQVQSA

SEQ ID NO: 456 - protein, 125 aa, Artificial Sequence
  Synthetic polymer.
EVQLVESGGGLVQPGGSLRLSCAASGFTFDDYAIGWFRQAPGKGREGVACIRIFDRHTYYADSVKGRFTISSDNSKNTVYLQMNSLRAEDTATYYCAAGSFWGCTRPEGDMDYFGQGTLVQVQSA

SEQ ID NO: 457 - protein, 4 aa, Artificial Sequence
  Synthetic polymer.
GGGS

SEQ ID NO: 458 - protein, 8 aa, Artificial Sequence
  Synthetic polymer.
GGGSGGGS

SEQ ID NO: 459 - protein, 12 aa, Artificial Sequence
  Synthetic polymer.
GGGSGGGSGGGS

SEQ ID NO: 460 - protein, 16 aa, Artificial Sequence
  Synthetic polymer.
GGGSGGGSGGGSGGGS

SEQ ID NO: 461 - protein, 20 aa, Artificial Sequence
  Synthetic polymer.
GGGSGGGSGGGSGGGSGGGS

SEQ ID NO: 462 - protein, 24 aa, Artificial Sequence
  Synthetic polymer.
GGGSGGGSGGGSGGGSGGGSGGGS

SEQ ID NO: 463 - protein, 28 aa, Artificial Sequence
  Synthetic polymer.
GGGSGGGSGGGSGGGSGGGSGGGSGGGS

SEQ ID NO: 464 - protein, 32 aa, Artificial Sequence
  Synthetic polymer.
GGGSGGGSGGGSGGGSGGGSGGGSGGGSGGGS

SEQ ID NO: 465-477 - skipped (13 entries)

SEQ ID NO: 478 - protein, 338 aa, Artificial Sequence
  Synthetic polymer.
MGWSCIIFFLVATATGVHSQVQLQESGGGLVQPGGSLRLSCAASGSIFSINVMGWYRQTPGKERELVAKITNFGITSYADSAQGRFTISRGNAKNTVYLQMNSLKPEDTAVYYCNLDTTGWGPPPYQYWGQGTQVTVSSGGSGGSGGSGGSGGSGGSGGSGGSGGSGGSGGSGGSGGSGGSGGSGGSGGSGGSGGSGGSAPTSSSTKKTQLQLEHLLLELQMILNGINNYKNPKLTAMLTKKFYMPKKATELKHLQCLEEELKPLEEVLNGAQSKNFHLRPRDLISNINVIVLELKGSETTFMCEYADETATIVEFLNRWITFAQSIISTLTHHHHHH

SEQ ID NO: 479 - protein, 338 aa, Artificial Sequence
  Synthetic polymer.
MGWSCIIFFLVATATGVHSQVQLQESGGGLVQPGGSLRLSCAASGSIFSINVMGWYRQTPGKERELVAKITNFGITSYADSAQGRFTISRGNAKNTVYLQMNSLKPEDTAVYYCNLDTTGWGPPPYQYWGQGTQVTVSSGGSGGSGGSGGSGGSGGSGGSGGSGGSGGSGGSGGSGGSGGSGGSGGSGGSGGSGGSGGSAPTSSSTKKTQLQLEHLLLVLQMILNGINNYKNPKLTAMLTKKFYMPKKATELKHLQCLEEELKPLEEVLNGAQSKNFHLRPRDLISNINVIVLELKGSETTFMCEYADETATIVEFLNRWITFAQSIISTLTHHHHHH

SEQ ID NO: 480 - protein, 338 aa, Artificial Sequence
  Synthetic polymer.
MGWSCIIFFLVATATGVHSQVQLQESGGGLVQPGGSLRLSCAASGSIFSINVMGWYRQTPGKERELVAKITNFGITSYADSAQGRFTISRGNAKNTVYLQMNSLKPEDTAVYYCNLDTTGWGPPPYQYWGQGTQVTVSSGGSGGSGGSGGSGGSGGSGGSGGSGGSGGSGGSGGSGGSGGSGGSGGSGGSGGSGGSGGSAPTSSSTKKTQLQLEHLLLDLQMILNGINNYKNPKLTAMLTKKFYMPKKATELKHLQCLEEELKPLEEVLNGAQSKNFHLRPRDLISAINVIVLELKGSETTFMCEYADETATIVEFLNRWITFAQSIISTLTHHHHHH

SEQ ID NO: 481 - protein, 338 aa, Artificial Sequence
  Synthetic polymer.
MGWSCIIFFLVATATGVHSQVQLQESGGGLVQPGGSLRLSCAASGSIFSINVMGWYRQTPGKERELVAKITNFGITSYADSAQGRFTISRGNAKNTVYLQMNSLKPEDTAVYYCNLDTTGWGPPPYQYWGQGTQVTVSSGGSGGSGGSGGSGGSGGSGGSGGSGGSGGSGGSGGSGGSGGSGGSGGSGGSGGSGGSGGSAPTSSSTKKTQLQLEHLLLDLQMILNGINNYKNPKLTAMLTKKFYMPKKATELKHLQCLEEELKPLEEVLNGAQSKNFHLRPRDLISGINVIVLELKGSETTFMCEYADETATIVEFLNRWITFAQSIISTLTHHHHHH

SEQ ID NO: 482 - protein, 439 aa, Artificial Sequence
  Synthetic polymer.
MKLPVRLLVLMFWIPASSSDKTHTCPPCPAPEAAGGPSVFLFPPKPKDTLMISRTPEVTCVVVDVSHEDPEVKFNWYVDGVEVHNAKTKPREEQYNSTYRVVSVLTVLHQDWLNGKEYKCQVSNKALPAPIEKTISKAKGQPREPQVYTLPPCRDELTKNQVSLWCLVKGFYPSDIAVEWESNGQPENNYKTTPPVLDSDGSFFLYSKLTVDKSRWQQGNVFSCSVMHEALHNHYTQKSLSLSPGKGGSGGSGGSGGSGGSGGSGGSGGSGGSGGSGGSGGSGGSGGSGGSGGSGGSGGSGGSGGSAPTSSSTKKTQLQLEHLLLDLQMILNGINNYKNPKLTRMLTFKFAMPKKATELKHLQCLEEELKPLEEVLNGAQSKNFHLRPRDLISNINVIVLELKGSETTFMCEYADETATIVEFLNRWITFAQSIISTLT

SEQ ID NO: 483 - protein, 426 aa, Artificial Sequence; identical to SEQ ID NO: 297
  Synthetic polymer.

SEQ ID NO: 484 - protein, 439 aa, Artificial Sequence
  Synthetic polymer.
MKLPVRLLVLMFWIPASSSDKTHTCPPCPAPEAAGGPSVFLFPPKPKDTLMISRTPEVTCVVVDVSHEDPEVKFNWYVDGVEVHNAKTKPREEQYNSTYRVVSVLTVLHQDWLNGKEYKCQVSNKALPAPIEKTISKAKGQPREPQVYTLPPCRDELTKNQVSLWCLVKGFYPSDIAVEWESNGQPENNYKTTPPVLDSDGSFFLYSKLTVDKSRWQQGNVFSCSVMHEALHNHYTQKSLSLSPGKGGSGGSGGSGGSGGSGGSGGSGGSGGSGGSGGSGGSGGSGGSGGSGGSGGSGGSGGSGGSAPASSSTKKTQLQLEHLLLDLQMILNGINNYKNPKLTRMLTFKFAMPKKATELKHLQCLEEELKPLEEVLNGAQSKNFHLRPRDLISNINVIVLELKGSETTFMCEYADETATIVEFLNRWITFAQSIISTLT

SEQ ID NO: 485 - protein, 439 aa, Artificial Sequence
  Synthetic polymer.
MKLPVRLLVLMFWIPASSSDKTHTCPPCPAPEAAGGPSVFLFPPKPKDTLMISRTPEVTCVVVDVSHEDPEVKFNWYVDGVEVHNAKTKPREEQYNSTYRVVSVLTVLHQDWLNGKEYKCQVSNKALPAPIEKTISKAKGQPREPQVYTLPPCRDELTKNQVSLWCLVKGFYPSDIAVEWESNGQPENNYKTTPPVLDSDGSFFLYSKLTVDKSRWQQGNVFSCSVMHEALHNHYTQKSLSLSPGKGGSGGSGGSGGSGGSGGSGGSGGSGGSGGSGGSGGSGGSGGSGGSGGSGGSGGSGGSGGSAPHSSSTKKTQLQLEHLLLDLQMILNGINNYKNPKLTRMLTFKFAMPKKATELKHLQCLEEELKPLEEVLNGAQSKNFHLRPRDLISNINVIVLELKGSETTFMCEYADETATIVEFLNRWITFAQSIISTLT

SEQ ID NO: 486 - protein, 439 aa, Artificial Sequence
  Synthetic polymer.
MKLPVRLLVLMFWIPASSSDKTHTCPPCPAPEAAGGPSVFLFPPKPKDTLMISRTPEVTCVVVDVSHEDPEVKFNWYVDGVEVHNAKTKPREEQYNSTYRVVSVLTVLHQDWLNGKEYKCQVSNKALPAPIEKTISKAKGQPREPQVYTLPPCRDELTKNQVSLWCLVKGFYPSDIAVEWESNGQPENNYKTTPPVLDSDGSFFLYSKLTVDKSRWQQGNVFSCSVMHEALHNHYTQKSLSLSPGKGGSGGSGGSGGSGGSGGSGGSGGSGGSGGSGGSGGSGGSGGSGGSGGSGGSGGSGGSGGSAPLSSSTKKTQLQLEHLLLDLQMILNGINNYKNPKLTRMLTFKFAMPKKATELKHLQCLEEELKPLEEVLNGAQSKNFHLRPRDLISNINVIVLELKGSETTFMCEYADETATIVEFLNRWITFAQSIISTLT

SEQ ID NO: 487 - protein, 439 aa, Artificial Sequence
  Synthetic polymer.
MKLPVRLLVLMFWIPASSSDKTHTCPPCPAPEAAGGPSVFLFPPKPKDTLMISRTPEVTCVVVDVSHEDPEVKFNWYVDGVEVHNAKTKPREEQYNSTYRVVSVLTVLHQDWLNGKEYKCQVSNKALPAPIEKTISKAKGQPREPQVYTLPPCRDELTKNQVSLWCLVKGFYPSDIAVEWESNGQPENNYKTTPPVLDSDGSFFLYSKLTVDKSRWQQGNVFSCSVMHEALHNHYTQKSLSLSPGKGGSGGSGGSGGSGGSGGSGGSGGSGGSGGSGGSGGSGGSGGSGGSGGSGGSGGSGGSGGSAPVSSSTKKTQLQLEHLLLDLQMILNGINNYKNPKLTRMLTFKFAMPKKATELKHLQCLEEELKPLEEVLNGAQSKNFHLRPRDLISNINVIVLELKGSETTFMCEYADETATIVEFLNRWITFAQSIISTLT

SEQ ID NO: 488 - protein, 439 aa, Artificial Sequence
  Synthetic polymer.
MKLPVRLLVLMFWIPASSSDKTHTCPPCPAPEAAGGPSVFLFPPKPKDTLMISRTPEVTCVVVDVSHEDPEVKFNWYVDGVEVHNAKTKPREEQYNSTYRVVSVLTVLHQDWLNGKEYKCQVSNKALPAPIEKTISKAKGQPREPQVYTLPPCRDELTKNQVSLWCLVKGFYPSDIAVEWESNGQPENNYKTTPPVLDSDGSFFLYSKLTVDKSRWQQGNVFSCSVMHEALHNHYTQKSLSLSPGKGGSGGSGGSGGSGGSGGSGGSGGSGGSGGSGGSGGSGGSGGSGGSGGSGGSGGSGGSGGSAPYSSSTKKTQLQLEHLLLDLQMILNGINNYKNPKLTRMLTFKFAMPKKATELKHLQCLEEELKPLEEVLNGAQSKNFHLRPRDLISNINVIVLELKGSETTFMCEYADETATIVEFLNRWITFAQSIISTLT

SEQ ID NO: 489 - protein, 436 aa, Artificial Sequence
  Synthetic polymer.
MKLPVRLLVLMFWIPASSSDKTHTCPPCPAPEAAGGPSVFLFPPKPKDTLMISRTPEVTCVVVDVSHEDPEVKFNWYVDGVEVHNAKTKPREEQYNSTYRVVSVLTVLHQDWLNGKEYKCQVSNKALPAPIEKTISKAKGQPREPQVYTLPPCRDELTKNQVSLWCLVKGFYPSDIAVEWESNGQPENNYKTTPPVLDSDGSFFLYSKLTVDKSRWQQGNVFSCSVMHEALHNHYTQKSLSLSPGKGGSGGSGGSGGSGGSGGSGGSGGSGGSGGSGGSGGSGGSGGSGGSGGSGGSGGSGGSGGSSSSTKKTQLQLEHLLLDLQMILNGINNYKNPKLTRMLTFKFAMPKKATELKHLQCLEEELKPLEEVLNGAQSKNFHLRPRDLISNINVIVLELKGSETTFMCEYADETATIVEFLNRWITFAQSIISTLT

SEQ ID NO: 490 - protein, 435 aa, Artificial Sequence
  Synthetic polymer.
MKLPVRLLVLMFWIPASSSDKTHTCPPCPAPEAAGGPSVFLFPPKPKDTLMISRTPEVTCVVVDVSHEDPEVKFNWYVDGVEVHNAKTKPREEQYNSTYRVVSVLTVLHQDWLNGKEYKCQVSNKALPAPIEKTISKAKGQPREPQVYTLPPCRDELTKNQVSLWCLVKGFYPSDIAVEWESNGQPENNYKTTPPVLDSDGSFFLYSKLTVDKSRWQQGNVFSCSVMHEALHNHYTQKSLSLSPGKGGSGGSGGSGGSGGSGGSGGSGGSGGSGGSGGSGGSGGSGGSGGSGGSGGSGGSGGSGGSSSTKKTQLQLEHLLLDLQMILNGINNYKNPKLTRMLTFKFAMPKKATELKHLQCLEEELKPLEEVLNGAQSKNFHLRPRDLISNINVIVLELKGSETTFMCEYADETATIVEFLNRWITFAQSIISTLT

SEQ ID NO: 491 - protein, 434 aa, Artificial Sequence
  Synthetic polymer.
MKLPVRLLVLMFWIPASSSDKTHTCPPCPAPEAAGGPSVFLFPPKPKDTLMISRTPEVTCVVVDVSHEDPEVKFNWYVDGVEVHNAKTKPREEQYNSTYRVVSVLTVLHQDWLNGKEYKCQVSNKALPAPIEKTISKAKGQPREPQVYTLPPCRDELTKNQVSLWCLVKGFYPSDIAVEWESNGQPENNYKTTPPVLDSDGSFFLYSKLTVDKSRWQQGNVFSCSVMHEALHNHYTQKSLSLSPGKGGSGGSGGSGGSGGSGGSGGSGGSGGSGGSGGSGGSGGSGGSGGSGGSGGSGGSGGSGGSSTKKTQLQLEHLLLDLQMILNGINNYKNPKLTRMLTFKFAMPKKATELKHLQCLEEELKPLEEVLNGAQSKNFHLRPRDLISNINVIVLELKGSETTFMCEYADETATIVEFLNRWITFAQSIISTLT

SEQ ID NO: 492 - protein, 433 aa, Artificial Sequence
  Synthetic polymer.
MKLPVRLLVLMFWIPASSSDKTHTCPPCPAPEAAGGPSVFLFPPKPKDTLMISRTPEVTCVVVDVSHEDPEVKFNWYVDGVEVHNAKTKPREEQYNSTYRVVSVLTVLHQDWLNGKEYKCQVSNKALPAPIEKTISKAKGQPREPQVYTLPPCRDELTKNQVSLWCLVKGFYPSDIAVEWESNGQPENNYKTTPPVLDSDGSFFLYSKLTVDKSRWQQGNVFSCSVMHEALHNHYTQKSLSLSPGKGGSGGSGGSGGSGGSGGSGGSGGSGGSGGSGGSGGSGGSGGSGGSGGSGGSGGSGGSGGSTKKTQLQLEHLLLDLQMILNGINNYKNPKLTRMLTFKFAMPKKATELKHLQCLEEELKPLEEVLNGAQSKNFHLRPRDLISNINVIVLELKGSETTFMCEYADETATIVEFLNRWITFAQSIISTLT

SEQ ID NO: 493 - protein, 432 aa, Artificial Sequence
  Synthetic polymer.
MKLPVRLLVLMFWIPASSSDKTHTCPPCPAPEAAGGPSVFLFPPKPKDTLMISRTPEVTCVVVDVSHEDPEVKFNWYVDGVEVHNAKTKPREEQYNSTYRVVSVLTVLHQDWLNGKEYKCQVSNKALPAPIEKTISKAKGQPREPQVYTLPPCRDELTKNQVSLWCLVKGFYPSDIAVEWESNGQPENNYKTTPPVLDSDGSFFLYSKLTVDKSRWQQGNVFSCSVMHEALHNHYTQKSLSLSPGKGGSGGSGGSGGSGGSGGSGGSGGSGGSGGSGGSGGSGGSGGSGGSGGSGGSGGSGGSGGSKKTQLQLEHLLLDLQMILNGINNYKNPKLTRMLTFKFAMPKKATELKHLQCLEEELKPLEEVLNGAQSKNFHLRPRDLISNINVIVLELKGSETTFMCEYADETATIVEFLNRWITFAQSIISTLT

SEQ ID NO: 494 - protein, 431 aa, Artificial Sequence
  Synthetic polymer.
MKLPVRLLVLMFWIPASSSDKTHTCPPCPAPEAAGGPSVFLFPPKPKDTLMISRTPEVTCVVVDVSHEDPEVKFNWYVDGVEVHNAKTKPREEQYNSTYRVVSVLTVLHQDWLNGKEYKCQVSNKALPAPIEKTISKAKGQPREPQVYTLPPCRDELTKNQVSLWCLVKGFYPSDIAVEWESNGQPENNYKTTPPVLDSDGSFFLYSKLTVDKSRWQQGNVFSCSVMHEALHNHYTQKSLSLSPGKGGSGGSGGSGGSGGSGGSGGSGGSGGSGGSGGSGGSGGSGGSGGSGGSGGSGGSGGSGGSKTQLQLEHLLLDLQMILNGINNYKNPKLTRMLTFKFAMPKKATELKHLQCLEEELKPLEEVLNGAQSKNFHLRPRDLISNINVIVLELKGSETTFMCEYADETATIVEFLNRWITFAQSIISTLT

SEQ ID NO: 495 - protein, 388 aa, Artificial Sequence
  Synthetic polymer.
MGWSCIIFFLVATATGVHSDVQLQESGGGLVQPGGSLRLSCTASLFTLEYYPIGWFRQAPGKEREGVSCISSKDSMTDYADSVKGRFTISRDNAKNTVYLQMNNLKPEDTAVYYCATDGMGGSDWCGVTADGYDYWGQGTQVTVSSGGSGGSGGSGGSGGSDKTHTCPPCPAPEAAGGPSVFLFPPKPKDTLMISRTPEVTCVVVDVSHEDPEVKFNWYVDGVEVHNAKTKPREEQYNSTYRVVSVLTVLHQDWLNGKEYKCQVSNKALPAPIEKTISKAKGQPREPQVCTLPPSRDELTKNQVSLSCAVKGFYPSDIAVEWESNGQPENNYKTTPPVLDSDGSFFLVSKLTVDKSRWQQGNVFSCSVMHEALHNHYTQKSLSLSPGK

SEQ ID NO: 496-500 - skipped (5 entries)

SEQ ID NO: 501 - protein, 426 aa, Artificial Sequence; identical to SEQ ID NO: 297
  Synthetic polymer.

SEQ ID NO: 502 - protein, 439 aa, Artificial Sequence; identical to SEQ ID NO: 291
  Synthetic polymer.

SEQ ID NO: 503 - protein, 439 aa, Artificial Sequence; identical to SEQ ID NO: 291
  Synthetic polymer.

SEQ ID NO: 504 - protein, 439 aa, Artificial Sequence
  Synthetic polymer.
MKLPVRLLVLMFWIPASSSDKTHTCPPCPAPEAAGGPSVFLFPPKPKDTLMISRTPEVTCVVVDVSHEDPEVKFNWYVDGVEVHNAKTKPREEQYNSTYRVVSVLTVLHQDWLNGKEYKCQVSNKALPAPIEKTISKAKGQPREPQVYTLPPCRDELTKNQVSLWCLVKGFYPSDIAVEWESNGQPENNYKTTPPVLDSDGSFFLYSKLTVDKSRWQQGNVFSCSVMHEALHNHYTQKSLSLSPGKGGSGGSGGSGGSGGSGGSGGSGGSGGSGGSGGSGGSGGSGGSGGSGGSGGSGGSGGSGGSAPTSSSTKKTQLQLEHLLLDLQMILNGINNYKNPKLTRMLTFKFYMPKKATELKHLQCLEEELKPLEEVLNLAQSKNFHLRPRDLISNINVIVLELKGSETTFMCEYADETATIVEFLNRWITFADSIISTLT

SEQ ID NO: 505 - protein, 439 aa, Artificial Sequence
  Synthetic polymer.
MKLPVRLLVLMFWIPASSSDKTHTCPPCPAPEAAGGPSVFLFPPKPKDTLMISRTPEVTCVVVDVSHEDPEVKFNWYVDGVEVHNAKTKPREEQYNSTYRVVSVLTVLHQDWLNGKEYKCQVSNKALPAPIEKTISKAKGQPREPQVYTLPPCRDELTKNQVSLWCLVKGFYPSDIAVEWESNGQPENNYKTTPPVLDSDGSFFLYSKLTVDKSRWQQGNVFSCSVMHEALHNHYTQKSLSLSPGKGGSGGSGGSGGSGGSGGSGGSGGSGGSGGSGGSGGSGGSGGSGGSGGSGGSGGSGGSGGSAPTSSSTKKTQLQLEHLLLDLQMILNGINNYKNPKLTRMLTFKFYMPKKATELKHLQCLEEELKPLEEVLNLAQSKNFHLRPRDLISNINVIVLELKGSETTFMCEYADETATIVEFLNRWITFAESIISTLT

SEQ ID NO: 506 - protein, 439 aa, Artificial Sequence
  Synthetic polymer.
MKLPVRLLVLMFWIPASSSDKTHTCPPCPAPEAAGGPSVFLFPPKPKDTLMISRTPEVTCVVVDVSHEDPEVKFNWYVDGVEVHNAKTKPREEQYNSTYRVVSVLTVLHQDWLNGKEYKCQVSNKALPAPIEKTISKAKGQPREPQVYTLPPCRDELTKNQVSLWCLVKGFYPSDIAVEWESNGQPENNYKTTPPVLDSDGSFFLYSKLTVDKSRWQQGNVFSCSVMHEALHNHYTQKSLSLSPGKGGSGGSGGSGGSGGSGGSGGSGGSGGSGGSGGSGGSGGSGGSGGSGGSGGSGGSGGSGGSAPTSSSTKKTQLQLEHLLLDLQMILNGINNYKNPKLTRMLTFKFYMPKKATELKHLQCLEEELKPLEEVLNLAQSKNFHLRPRDLISNINVIVLELKGSETTFMCEYADETATIVEFLNRWITFAFSIISTLT

SEQ ID NO: 507 - protein, 439 aa, Artificial Sequence
  Synthetic polymer.
MKLPVRLLVLMFWIPASSSDKTHTCPPCPAPEAAGGPSVFLFPPKPKDTLMISRTPEVTCVVVDVSHEDPEVKFNWYVDGVEVHNAKTKPREEQYNSTYRVVSVLTVLHQDWLNGKEYKCQVSNKALPAPIEKTISKAKGQPREPQVYTLPPCRDELTKNQVSLWCLVKGFYPSDIAVEWESNGQPENNYKTTPPVLDSDGSFFLYSKLTVDKSRWQQGNVFSCSVMHEALHNHYTQKSLSLSPGKGGSGGSGGSGGSGGSGGSGGSGGSGGSGGSGGSGGSGGSGGSGGSGGSGGSGGSGGSGGSAPTSSSTKKTQLQLEHLLLDLQMILNGINNYKNPKLTRMLTFKFYMPKKATELKHLQCLEEELKPLEEVLNLAQSKNFHLRPRDLISNINVIVLELKGSETTFMCEYADETATIVEFLNRWITFAGSIISTLT

SEQ ID NO: 508 - protein, 439 aa, Artificial Sequence
  Synthetic polymer.
MKLPVRLLVLMFWIPASSSDKTHTCPPCPAPEAAGGPSVFLFPPKPKDTLMISRTPEVTCVVVDVSHEDPEVKFNWYVDGVEVHNAKTKPREEQYNSTYRVVSVLTVLHQDWLNGKEYKCQVSNKALPAPIEKTISKAKGQPREPQVYTLPPCRDELTKNQVSLWCLVKGFYPSDIAVEWESNGQPENNYKTTPPVLDSDGSFFLYSKLTVDKSRWQQGNVFSCSVMHEALHNHYTQKSLSLSPGKGGSGGSGGSGGSGGSGGSGGSGGSGGSGGSGGSGGSGGSGGSGGSGGSGGSGGSGGSGGSAPTSSSTKKTQLQLEHLLLDLQMILNGINNYKNPKLTRMLTFKFYMPKKATELKHLQCLEEELKPLEEVLNLAQSKNFHLRPRDLISNINVIVLELKGSETTFMCEYADETATIVEFLNRWITFAHSIISTLT

SEQ ID NO: 509 - protein, 439 aa, Artificial Sequence
  Synthetic polymer.
MKLPVRLLVLMFWIPASSSDKTHTCPPCPAPEAAGGPSVFLFPPKPKDTLMISRTPEVTCVVVDVSHEDPEVKFNWYVDGVEVHNAKTKPREEQYNSTYRVVSVLTVLHQDWLNGKEYKCQVSNKALPAPIEKTISKAKGQPREPQVYTLPPCRDELTKNQVSLWCLVKGFYPSDIAVEWESNGQPENNYKTTPPVLDSDGSFFLYSKLTVDKSRWQQGNVFSCSVMHEALHNHYTQKSLSLSPGKGGSGGSGGSGGSGGSGGSGGSGGSGGSGGSGGSGGSGGSGGSGGSGGSGGSGGSGGSGGSAPTSSSTKKTQLQLEHLLLDLQMILNGINNYKNPKLTRMLTFKFYMPKKATELKHLQCLEEELKPLEEVLNLAQSKNFHLRPRDLISNINVIVLELKGSETTFMCEYADETATIVEFLNRWITFAISIISTLT

SEQ ID NO: 510 - protein, 439 aa, Artificial Sequence
  Synthetic polymer.
MKLPVRLLVLMFWIPASSSDKTHTCPPCPAPEAAGGPSVFLFPPKPKDTLMISRTPEVTCVVVDVSHEDPEVKFNWYVDGVEVHNAKTKPREEQYNSTYRVVSVLTVLHQDWLNGKEYKCQVSNKALPAPIEKTISKAKGQPREPQVYTLPPCRDELTKNQVSLWCLVKGFYPSDIAVEWESNGQPENNYKTTPPVLDSDGSFFLYSKLTVDKSRWQQGNVFSCSVMHEALHNHYTQKSLSLSPGKGGSGGSGGSGGSGGSGGSGGSGGSGGSGGSGGSGGSGGSGGSGGSGGSGGSGGSGGSGGSAPTSSSTKKTQLQLEHLLLDLQMILNGINNYKNPKLTRMLTFKFYMPKKATELKHLQCLEEELKPLEEVLNLAQSKNFHLRPRDLISNINVIVLELKGSETTFMCEYADETATIVEFLNRWITFAKSIISTLT

SEQ ID NO: 511 - protein, 439 aa, Artificial Sequence
  Synthetic polymer.
MKLPVRLLVLMFWIPASSSDKTHTCPPCPAPEAAGGPSVFLFPPKPKDTLMISRTPEVTCVVVDVSHEDPEVKFNWYVDGVEVHNAKTKPREEQYNSTYRVVSVLTVLHQDWLNGKEYKCQVSNKALPAPIEKTISKAKGQPREPQVYTLPPCRDELTKNQVSLWCLVKGFYPSDIAVEWESNGQPENNYKTTPPVLDSDGSFFLYSKLTVDKSRWQQGNVFSCSVMHEALHNHYTQKSLSLSPGKGGSGGSGGSGGSGGSGGSGGSGGSGGSGGSGGSGGSGGSGGSGGSGGSGGSGGSGGSGGSAPTSSSTKKTQLQLEHLLLDLQMILNGINNYKNPKLTRMLTFKFYMPKKATELKHLQCLEEELKPLEEVLNLAQSKNFHLRPRDLISNINVIVLELKGSETTFMCEYADETATIVEFLNRWITFALSIISTLT

SEQ ID NO: 512 - protein, 439 aa, Artificial Sequence
  Synthetic polymer.
MKLPVRLLVLMFWIPASSSDKTHTCPPCPAPEAAGGPSVFLFPPKPKDTLMISRTPEVTCVVVDVSHEDPEVKFNWYVDGVEVHNAKTKPREEQYNSTYRVVSVLTVLHQDWLNGKEYKCQVSNKALPAPIEKTISKAKGQPREPQVYTLPPCRDELTKNQVSLWCLVKGFYPSDIAVEWESNGQPENNYKTTPPVLDSDGSFFLYSKLTVDKSRWQQGNVFSCSVMHEALHNHYTQKSLSLSPGKGGSGGSGGSGGSGGSGGSGGSGGSGGSGGSGGSGGSGGSGGSGGSGGSGGSGGSGGSGGSAPTSSSTKKTQLQLEHLLLDLQMILNGINNYKNPKLTRMLTFKFYMPKKATELKHLQCLEEELKPLEEVLNLAQSKNFHLRPRDLISNINVIVLELKGSETTFMCEYADETATIVEFLNRWITFAMSIISTLT

SEQ ID NO: 513 - protein, 439 aa, Artificial Sequence
  Synthetic polymer.
MKLPVRLLVLMFWIPASSSDKTHTCPPCPAPEAAGGPSVFLFPPKPKDTLMISRTPEVTCVVVDVSHEDPEVKFNWYVDGVEVHNAKTKPREEQYNSTYRVVSVLTVLHQDWLNGKEYKCQVSNKALPAPIEKTISKAKGQPREPQVYTLPPCRDELTKNQVSLWCLVKGFYPSDIAVEWESNGQPENNYKTTPPVLDSDGSFFLYSKLTVDKSRWQQGNVFSCSVMHEALHNHYTQKSLSLSPGKGGSGGSGGSGGSGGSGGSGGSGGSGGSGGSGGSGGSGGSGGSGGSGGSGGSGGSGGSGGSAPTSSSTKKTQLQLEHLLLDLQMILNGINNYKNPKLTRMLTFKFYMPKKATELKHLQCLEEELKPLEEVLNLAQSKNFHLRPRDLISNINVIVLELKGSETTFMCEYADETATIVEFLNRWITFANSIISTLT

SEQ ID NO: 514 - protein, 439 aa, Artificial Sequence
  Synthetic polymer.
MKLPVRLLVLMFWIPASSSDKTHTCPPCPAPEAAGGPSVFLFPPKPKDTLMISRTPEVTCVVVDVSHEDPEVKFNWYVDGVEVHNAKTKPREEQYNSTYRVVSVLTVLHQDWLNGKEYKCQVSNKALPAPIEKTISKAKGQPREPQVYTLPPCRDELTKNQVSLWCLVKGFYPSDIAVEWESNGQPENNYKTTPPVLDSDGSFFLYSKLTVDKSRWQQGNVFSCSVMHEALHNHYTQKSLSLSPGKGGSGGSGGSGGSGGSGGSGGSGGSGGSGGSGGSGGSGGSGGSGGSGGSGGSGGSGGSGGSAPTSSSTKKTQLQLEHLLLDLQMILNGINNYKNPKLTRMLTFKFYMPKKATELKHLQCLEEELKPLEEVLNLAQSKNFHLRPRDLISNINVIVLELKGSETTFMCEYADETATIVEFLNRWITFAPSIISTLT

SEQ ID NO: 515 - protein, 439 aa, Artificial Sequence
  Synthetic polymer.
MKLPVRLLVLMFWIPASSSDKTHTCPPCPAPEAAGGPSVFLFPPKPKDTLMISRTPEVTCVVVDVSHEDPEVKFNWYVDGVEVHNAKTKPREEQYNSTYRVVSVLTVLHQDWLNGKEYKCQVSNKALPAPIEKTISKAKGQPREPQVYTLPPCRDELTKNQVSLWCLVKGFYPSDIAVEWESNGQPENNYKTTPPVLDSDGSFFLYSKLTVDKSRWQQGNVFSCSVMHEALHNHYTQKSLSLSPGKGGSGGSGGSGGSGGSGGSGGSGGSGGSGGSGGSGGSGGSGGSGGSGGSGGSGGSGGSGGSAPTSSSTKKTQLQLEHLLLDLQMILNGINNYKNPKLTRMLTFKFYMPKKATELKHLQCLEEELKPLEEVLNLAQSKNFHLRPRDLISNINVIVLELKGSETTFMCEYADETATIVEFLNRWITFARSIISTLT

SEQ ID NO: 516 - protein, 439 aa, Artificial Sequence
  Synthetic polymer.
MKLPVRLLVLMFWIPASSSDKTHTCPPCPAPEAAGGPSVFLFPPKPKDTLMISRTPEVTCVVVDVSHEDPEVKFNWYVDGVEVHNAKTKPREEQYNSTYRVVSVLTVLHQDWLNGKEYKCQVSNKALPAPIEKTISKAKGQPREPQVYTLPPCRDELTKNQVSLWCLVKGFYPSDIAVEWESNGQPENNYKTTPPVLDSDGSFFLYSKLTVDKSRWQQGNVFSCSVMHEALHNHYTQKSLSLSPGKGGSGGSGGSGGSGGSGGSGGSGGSGGSGGSGGSGGSGGSGGSGGSGGSGGSGGSGGSGGSAPTSSSTKKTQLQLEHLLLDLQMILNGINNYKNPKLTRMLTFKFYMPKKATELKHLQCLEEELKPLEEVLNLAQSKNFHLRPRDLISNINVIVLELKGSETTFMCEYADETATIVEFLNRWITFASSIISTLT

SEQ ID NO: 517 - protein, 439 aa, Artificial Sequence
  Synthetic polymer.
MKLPVRLLVLMFWIPASSSDKTHTCPPCPAPEAAGGPSVFLFPPKPKDTLMISRTPEVTCVVVDVSHEDPEVKFNWYVDGVEVHNAKTKPREEQYNSTYRVVSVLTVLHQDWLNGKEYKCQVSNKALPAPIEKTISKAKGQPREPQVYTLPPCRDELTKNQVSLWCLVKGFYPSDIAVEWESNGQPENNYKTTPPVLDSDGSFFLYSKLTVDKSRWQQGNVFSCSVMHEALHNHYTQKSLSLSPGKGGSGGSGGSGGSGGSGGSGGSGGSGGSGGSGGSGGSGGSGGSGGSGGSGGSGGSGGSGGSAPTSSSTKKTQLQLEHLLLDLQMILNGINNYKNPKLTRMLTFKFYMPKKATELKHLQCLEEELKPLEEVLNLAQSKNFHLRPRDLISNINVIVLELKGSETTFMCEYADETATIVEFLNRWITFATSIISTLT

SEQ ID NO: 518 - protein, 439 aa, Artificial Sequence
  Synthetic polymer.
MKLPVRLLVLMFWIPASSSDKTHTCPPCPAPEAAGGPSVFLFPPKPKDTLMISRTPEVTCVVVDVSHEDPEVKFNWYVDGVEVHNAKTKPREEQYNSTYRVVSVLTVLHQDWLNGKEYKCQVSNKALPAPIEKTISKAKGQPREPQVYTLPPCRDELTKNQVSLWCLVKGFYPSDIAVEWESNGQPENNYKTTPPVLDSDGSFFLYSKLTVDKSRWQQGNVFSCSVMHEALHNHYTQKSLSLSPGKGGSGGSGGSGGSGGSGGSGGSGGSGGSGGSGGSGGSGGSGGSGGSGGSGGSGGSGGSGGSAPTSSSTKKTQLQLEHLLLDLQMILNGINNYKNPKLTRMLTFKFYMPKKATELKHLQCLEEELKPLEEVLNLAQSKNFHLRPRDLISNINVIVLELKGSETTFMCEYADETATIVEFLNRWITFAVSIISTLT

SEQ ID NO: 519 - protein, 439 aa, Artificial Sequence
  Synthetic polymer.
MKLPVRLLVLMFWIPASSSDKTHTCPPCPAPEAAGGPSVFLFPPKPKDTLMISRTPEVTCVVVDVSHEDPEVKFNWYVDGVEVHNAKTKPREEQYNSTYRVVSVLTVLHQDWLNGKEYKCQVSNKALPAPIEKTISKAKGQPREPQVYTLPPCRDELTKNQVSLWCLVKGFYPSDIAVEWESNGQPENNYKTTPPVLDSDGSFFLYSKLTVDKSRWQQGNVFSCSVMHEALHNHYTQKSLSLSPGKGGSGGSGGSGGSGGSGGSGGSGGSGGSGGSGGSGGSGGSGGSGGSGGSGGSGGSGGSGGSAPTSSSTKKTQLQLEHLLLDLQMILNGINNYKNPKLTRMLTFKFYMPKKATELKHLQCLEEELKPLEEVLNLAQSKNFHLRPRDLISNINVIVLELKGSETTFMCEYADETATIVEFLNRWITFAWSIISTLT

SEQ ID NO: 520 - protein, 439 aa, Artificial Sequence
  Synthetic polymer.
MKLPVRLLVLMFWIPASSSDKTHTCPPCPAPEAAGGPSVFLFPPKPKDTLMISRTPEVTCVVVDVSHEDPEVKFNWYVDGVEVHNAKTKPREEQYNSTYRVVSVLTVLHQDWLNGKEYKCQVSNKALPAPIEKTISKAKGQPREPQVYTLPPCRDELTKNQVSLWCLVKGFYPSDIAVEWESNGQPENNYKTTPPVLDSDGSFFLYSKLTVDKSRWQQGNVFSCSVMHEALHNHYTQKSLSLSPGKGGSGGSGGSGGSGGSGGSGGSGGSGGSGGSGGSGGSGGSGGSGGSGGSGGSGGSGGSGGSAPTSSSTKKTQLQLEHLLLDLQMILNGINNYKNPKLTRMLTFKFYMPKKATELKHLQCLEEELKPLEEVLNLAQSKNFHLRPRDLISNINVIVLELKGSETTFMCEYADETATIVEFLNRWITFAYSIISTLT

SEQ ID NO: 521 - protein, 381 aa, Artificial Sequence
  Synthetic polymer.
MGWSCIIFFLVATATGVHSQVQLQESGGGLVQPGGSLRLSCAASGSIFSINVMGWYRQTPGKERELVAKITNFGITSYADSAQGRFTISRGNAKNTVYLQMNSLKPEDTAVYYCNLDTTGWGPPPYQYWGQGTQVTVSSGGSGGSGGSGGSGGSDKTHTCPPCPAPEAAGGPSVFLFPPKPKDTLMISRTPEVTCVVVDVSHEDPEVKFNWYVDGVEVHNAKTKPREEQYNSTYRVVSVLTVLHQDWLNGKEYKCQVSNKALPAPIEKTISKAKGQPREPQVCTLPPSRDELTKNQVSLSCAVKGFYPSDIAVEWESNGQPENNYKTTPPVLDSDGSFFLVSKLTVDKSRWQQGNVFSCSVMHEALHNHYTQKSLSLSPGK

SEQ ID NO: 522 - protein, 439 aa, Artificial Sequence
  Synthetic polymer.
MKLPVRLLVLMFWIPASSSDKTHTCPPCPAPEAAGGPSVFLFPPKPKDTLMISRTPEVTCVVVDVSHEDPEVKFNWYVDGVEVHNAKTKPREEQYNSTYRVVSVLTVLHQDWLNGKEYKCQVSNKALPAPIEKTISKAKGQPREPQVYTLPPCRDELTKNQVSLWCLVKGFYPSDIAVEWESNGQPENNYKTTPPVLDSDGSFFLYSKLTVDKSRWQQGNVFSCSVMHEALHNHYTQKSLSLSPGKGGSGGSGGSGGSGGSGGSGGSGGSGGSGGSGGSGGSGGSGGSGGSGGSGGSGGSGGSGGSAPTSSSTKKTQLQLEHLLLDLQMILNGINNYKNPKLTAMLTKKFYMPKKATELKHLQCLEEELKPLEEVLNLAQSKNFHLRPRDLISNINVIVLELKGSETTFMCEYADETATIVEFLNRWITFAGSIISTLT

SEQ ID NO: 523 - protein, 439 aa, Artificial Sequence
  Synthetic polymer.
MKLPVRLLVLMFWIPASSSDKTHTCPPCPAPEAAGGPSVFLFPPKPKDTLMISRTPEVTCVVVDVSHEDPEVKFNWYVDGVEVHNAKTKPREEQYNSTYRVVSVLTVLHQDWLNGKEYKCQVSNKALPAPIEKTISKAKGQPREPQVYTLPPCRDELTKNQVSLWCLVKGFYPSDIAVEWESNGQPENNYKTTPPVLDSDGSFFLYSKLTVDKSRWQQGNVFSCSVMHEALHNHYTQKSLSLSPGKGGSGGSGGSGGSGGSGGSGGSGGSGGSGGSGGSGGSGGSGGSGGSGGSGGSGGSGGSGGSAPTSSSTKKTQLQLEHLLLDLQMILNGINNYKNPKLTAMLTKKFYMPKKATELKHLQCLEEELKPLEEVLNLAQSKNFHLRPRDLISNINVIVLELKGSETTFMCEYADETATIVEFLNRWITFAISIISTLT

SEQ ID NO: 524 - protein, 439 aa, Artificial Sequence
  Synthetic polymer.
MKLPVRLLVLMFWIPASSSDKTHTCPPCPAPEAAGGPSVFLFPPKPKDTLMISRTPEVTCVVVDVSHEDPEVKFNWYVDGVEVHNAKTKPREEQYNSTYRVVSVLTVLHQDWLNGKEYKCQVSNKALPAPIEKTISKAKGQPREPQVYTLPPCRDELTKNQVSLWCLVKGFYPSDIAVEWESNGQPENNYKTTPPVLDSDGSFFLYSKLTVDKSRWQQGNVFSCSVMHEALHNHYTQKSLSLSPGKGGSGGSGGSGGSGGSGGSGGSGGSGGSGGSGGSGGSGGSGGSGGSGGSGGSGGSGGSGGSAPTSSSTKKTQLQLEHLLLDLQMILNGINNYKNPKLTAMLTKKFYMPKKATELKHLQCLEEELKPLEEVLNLAQSKNFHLRPRDLISNINVIVLELKGSETTFMCEYADETATIVEFLNRWITFAYSIISTLT

SEQ ID NO: 525 - protein, 384 aa, Artificial Sequence
  Synthetic polymer.
MGWSCIIFFLVATATGVHSDVQLQESGGGLVQAGGSLRLSCAASGVTFSQYIMGWFRQAPGKEREFVAAISYGAVNTFYTDSVKGRFTISRDNAKNLVYLRMNSLTVEDTALYYCAAGRPRQVSSKLEYDYWGQGTQVTVSSGGSGGSGGSGGSGGSDKTHTCPPCPAPEAAGGPSVFLFPPKPKDTLMISRTPEVTCVVVDVSHEDPEVKFNWYVDGVEVHNAKTKPREEQYNSTYRVVSVLTVLHQDWLNGKEYKCQVSNKALPAPIEKTISKAKGQPREPQVCTLPPSRDELTKNQVSLSCAVKGFYPSDIAVEWESNGQPENNYKTTPPVLDSDGSFFLVSKLTVDKSRWQQGNVFSCSVMHEALHNHYTQKSLSLSPGK

SEQ ID NO: 526 - protein, 426 aa, Artificial Sequence
  Synthetic polymer.
MGWSCIIFFLVATATGVHSQVQLQESGGGLVQPGESLRLSCAVSGSTSSMNAMAWYRQAPGKRRELVAGISGGGATNYPDSVKGRFTISRDNAKNTVYLQMSSLKPEDTAVYYCNLWPPRASPGGGVYWGQGTQVTVSSGGSGGSGGSGGSGGSGGSGGSGGSGGSGGSGGSGGSGGSGGSGGSGGSGGSGGSGGSGGSDKTHTCPPCPAPEAAGGPSVFLFPPKPKDTLMISRTPEVTCVVVDVSHEDPEVKFNWYVDGVEVHNAKTKPREEQYNSTYRVVSVLTVLHQDWLNGKEYKCQVSNKALPAPIEKTISKAKGQPREPQVCTLPPSRDELTKNQVSLSCAVKGFYPSDIAVEWESNGQPENNYKTTPPVLDSDGSFFLVSKLTVDKSRWQQGNVFSCSVMHEALHNHYTQKSLSLSPGK

SEQ ID NO: 527 - protein, 422 aa, Artificial Sequence
  Synthetic polymer.
MGWSCIIFFLVATATGVHSQVQLQESGGGLVQPGGSLRLSCAASGFDFGIYSMTWVRQAPGKGPEWVSTINSAGGRTVYADSVKGRFTISRDNAKNALYLQMNSLKPEDTALYYCARGPYTSAVRGQGTQVTVSSGGSGGSGGSGGSGGSGGSGGSGGSGGSGGSGGSGGSGGSGGSGGSGGSGGSGGSGGSGGSDKTHTCPPCPAPEAAGGPSVFLFPPKPKDTLMISRTPEVTCVVVDVSHEDPEVKFNWYVDGVEVHNAKTKPREEQYNSTYRVVSVLTVLHQDWLNGKEYKCQVSNKALPAPIEKTISKAKGQPREPQVCTLPPSRDELTKNQVSLSCAVKGFYPSDIAVEWESNGQPENNYKTTPPVLDSDGSFFLVSKLTVDKSRWQQGNVFSCSVMHEALHNHYTQKSLSLSPGK

SEQ ID NO: 528 - protein, 382 aa, Artificial Sequence
  Synthetic polymer.
MGWSCIIFFLVATATGVHSDVQLQESGGGLVQAGGSLRLSCVASGTSGLTFRSFGLGWFRQAPGKEREFVGAISMTGGTIYNPDSSKGRFTISRDNAKNTVYLQMNMLKAEDTAVYYCAVNGLGLNYDYWGQGTQVTVSSGGSGGSGGSGGSGGSDKTHTCPPCPAPEAAGGPSVFLFPPKPKDTLMISRTPEVTCVVVDVSHEDPEVKFNWYVDGVEVHNAKTKPREEQYNSTYRVVSVLTVLHQDWLNGKEYKCQVSNKALPAPIEKTISKAKGQPREPQVCTLPPSRDELTKNQVSLSCAVKGFYPSDIAVEWESNGQPENNYKTTPPVLDSDGSFFLVSKLTVDKSRWQQGNVFSCSVMHEALHNHYTQKSLSLSPGK

SEQ ID NO: 529 - protein, 581 aa, Artificial Sequence
  Synthetic polymer.
MGWSCIIFFLVATATGVHSDVQLQESGGGLVQPGGSLRLSCTASLFTLEYYPIGWFRQAPGKEREGVSCISSKDSMTDYADSVKGRFTISRDNAKNTVYLQMNNLKPEDTAVYYCATDGMGGSDWCGVTADGYDYWGQGTQVTVSSGGSGGSGGSGGSGGSDKTHTCPPCPAPEAAGGPSVFLFPPKPKDTLMISRTPEVTCVVVDVSHEDPEVKFNWYVDGVEVHNAKTKPREEQYNSTYRVVSVLTVLHQDWLNGKEYKCQVSNKALPAPIEKTISKAKGQPREPQVYTLPPCRDELTKNQVSLWCLVKGFYPSDIAVEWESNGQPENNYKTTPPVLDSDGSFFLYSKLTVDKSRWQQGNVFSCSVMHEALHNHYTQKSLSLSPGKGGSGGSGGSGGSGGSGGSGGSGGSGGSGGSGGSGGSGGSGGSGGSGGSGGSGGSGGSGGSAPTSSSTKKTQLQLEHLLLDLQMILNGINNYKNPKLTAMLTKKFYMPKKATELKHLQCLEEELKPLEEVLNLAQSKNFHLRPRDLISGINVIVLELKGSETTFMCEYADETATIVEFLNRWITFAQSIISTLT

SEQ ID NO: 530 - protein, 430 aa, Artificial Sequence
  Synthetic polymer.
MGWSCIIFFLVATATGVHSDVQLQESGGGLVQPGGSLRLSCAASGFTFSTYSMGWFRQAPGKEREFVAATTWLGSFTDYADSVKGRFTISRDNAKNTVYLQMNTLKSEDTAVYSCAATRAVYSITRNDDYAYWGQGTQVTVSSGGSGGSGGSGGSGGSGGSGGSGGSGGSGGSGGSGGSGGSGGSGGSGGSGGSGGSGGSGGSDKTHTCPPCPAPEAAGGPSVFLFPPKPKDTLMISRTPEVTCVVVDVSHEDPEVKFNWYVDGVEVHNAKTKPREEQYNSTYRVVSVLTVLHQDWLNGKEYKCQVSNKALPAPIEKTISKAKGQPREPQVCTLPPSRDELTKNQVSLSCAVKGFYPSDIAVEWESNGQPENNYKTTPPVLDSDGSFFLVSKLTVDKSRWQQGNVFSCSVMHEALHNHYTQKSLSLSPGK

SEQ ID NO: 531 - protein, 439 aa, Artificial Sequence
  Synthetic polymer.
MKLPVRLLVLMFWIPASSSDKTHTCPPCPAPEAAGGPSVFLFPPKPKDTLMISRTPEVTCVVVDVSHEDPEVKFNWYVDGVEVHNAKTKPREEQYNSTYRVVSVLTVLHQDWLNGKEYKCQVSNKALPAPIEKTISKAKGQPREPQVYTLPPCRDELTKNQVSLWCLVKGFYPSDIAVEWESNGQPENNYKTTPPVLDSDGSFFLYSKLTVDKSRWQQGNVFSCSVMHEALHNHYTQKSLSLSPGKGGSGGSGGSGGSGGSGGSGGSGGSGGSGGSGGSGGSGGSGGSGGSGGSGGSGGSGGSGGSAPTSSSTKKTQLQLEHLLLDLQMILNGINNYKNPKLTAMLTKKFYMPKKATELKHLQCLEEELKPLEEVLNLAQSKNFHLRPRDLISGINVIVLELKGSETTFMCEYADETATIVEFLNRWITFAGSIISTLT

What is claimed is:

1. A chimeric protein or protein complex comprising:
(a) a modified IL-2 signaling agent, wherein the modified IL-2 signaling agent has one or more mutations or modifications relative to a wild type signaling agent having SEQ ID NO: 1 that confer improved safety and reduced affinity or bioactivity of the modified IL-2 signaling agent for IL-2Rαβγ and/or IL-2Rβ and/or IL-2Rγ and/or IL-2Rα, relative to the wild type IL-2 signaling agent; and
(b) one or more targeting moieties, said targeting moieties comprising recognition domains which specifically bind to antigens or receptors of interest,
wherein the modified IL-2, and the one or more targeting moieties are optionally connected with one or more linkers,
wherein the modified IL-2 signaling agent comprises:
(i) a mutation selected from D20E, D20F, D20G, D20H, D20I, D20K, D20L, and D20V; or
(ii) a mutation selected from N88G, N88E, N88K, N88Q, and N88V; or
(iii) a mutation selected from Q126G, Q126A, Q126E, Q126F, Q126H, Q126I, Q126K, Q126L, Q126N, Q126P, Q126R, Q126S, Q126T, Q126V, Q126W, and Q126Y; or
(iv) a mutation selected from (i) and (iii) or a mutation selected from (ii) and (iii); or
(v) one or more mutations selected from:
R38A/F42K/N88G/C125A,
F42K/C125A,
D20E/C125A,
D20F/C125A,
D20G/C125A,
D20H/C125A,
D20I/C125A,
D20K/C125A,
D20L/C125A,
D20N/C125A,
D20S/C125A,
D20T/C125A,
D20V/C125A,
N88A/C125A,
N88D/C125A,
N88G/C125A,
N88E/C125A,
N88H/C125A,
N88I/C125A,
N88K/C125A,
N88Q/C125A,
N88R/C125A,
N88T/C125A,
N88V/C125A,
D20E/R38A/F42K,
D20E/R38A/F42K/C125A,
D20V/R38A/F42K,
D20V/R38A/F42K/C125A,
R38A/F42Y/E62A/C125A,
R38A/F42Y/Y45A/E62A,
F42Y/Y45A/L72G,
R38A/F42Y/Y45A/E62A/C125A,
F42Y/Y45A/L72G/C125A,
R38A/F42K/N88G,
R38A/F42K/Q126G,
R38A/F42K/Q126I,
R38A/F42K/Q126Y,
R38A/F42K/Q126G/C125A,
R38A/F42K/Q1261/C125A,
R38A/F42K/Q126Y/C125A,
R38A/F42K/E62A/N88G, and
R38A/F42K/E62A/N88G/C125A.

2. The chimeric protein or protein complex of claim 1, wherein the modified IL-2-signaling agent further comprises a glycosylation mutation, wherein the mutation decreases or eliminates glycosylation of the modified IL-2 signaling agent.

3. The chimeric protein or protein complex of claim 2, wherein the glycosylation mutation is a T3 substitution, wherein the mutation is one of T3A, T3F, T3H, T3L, T3V, and T3Y.

4. The chimeric protein or protein complex of claim 2, wherein the glysosylation mutation is a deletion of the first 3, 4, 5, 6, 7, or 8 residues of the modified IL-2.

5. A chimeric protein or protein complex comprising:
(a) a modified IL-2 signaling agent, wherein the modified IL-2 signaling agent has one or more mutations or modifications relative to a wild type signaling agent having SEQ ID NO: 1 that confer improved safety and reduced affinity or bioactivity of the modified IL-2 signaling agent for IL-2Rαβγ and/or IL-2Rβ and/or IL-2Rγ and/or IL-2Rα, relative to the wild type IL-2 signaling agent; and
(b) one or more targeting moieties, said targeting moieties comprising recognition domains which specifically bind to antigens or receptors of interest,
wherein the modified IL-2, and the one or more targeting moieties are optionally connected with one or more linkers,
wherein the modified IL-2 signaling agent comprises a glycosylation mutation, wherein the mutation decreases or eliminates glycosylation of the modified IL-2 signaling agent.

6. The chimeric protein or protein complex of claim 5, wherein the glycosylation mutation is a T3 substitution, optionally wherein the mutation is one of T3A, T3F, T3H, T3L, T3V, and T3Y.

7. The chimeric protein or protein complex of claim 5, wherein the glysosylation mutation is a deletion of the first 3, 4, 5, 6, 7, or 8 residues of the modified IL-2.

8. A chimeric protein or protein complex comprising:
(a) a modified IL-2 signaling agent, wherein the modified IL-2 signaling agent has one or more mutations or modifications relative to a neoleukin signaling agent having SEQ ID NO: 2 that confer improved safety and reduced affinity or bioactivity of the modified IL-2 signaling agent for IL-2Rαβγ and/or IL-2Rβ and/or IL-2Rγ and/or IL-2Rα, relative to the neoleukin signaling agent; and
(b) one or more targeting moieties, said targeting moieties comprising recognition domains which specifically bind to antigens or receptors of interest,
wherein the modified IL-2 signaling agent, and the one or more targeting moieties are optionally connected with one or more linkers,
wherein the modified IL-2 signaling agent comprises one or more mutations at a position selected from D15 and N40, optionally wherein the mutation is selected from D15T, D15H, N401, N40G, and N40R.

9. The chimeric protein or protein complex of any one of claims 1 to 8, wherein the modified IL-2 comprises one or more mutations that confer reduced affinity for an IL-2 receptor-chain.

10. The chimeric protein or protein complex of any one of claims 1 to 9, wherein the modified IL-2 exhibits reduced affinity for IL-2Rαβγ.

11. The chimeric protein or protein complex of any one of claims 1 to 9, wherein the modified IL-2 exhibits reduced affinity for IL-2Rβ, IL-2Rγ, or a combination thereof.

12. The chimeric protein or protein complex of any one of claims 1 to 9, wherein the modified IL-2 exhibits ablated affinity for IL-2Rα, IL-2Rβ, IL2Rγ or a combination thereof.

13. The chimeric protein or protein complex of claim 10, wherein the modified IL-2 exhibits reduced affinity for:
IL-2Rα and IL2Rβ, optionally wherein the modified IL-2 comprises one or more mutations selected from D20E/R38A/F42K, D20E/R38A/F42K/C125A, D20V/R38A/F42K, D20V/R38A/F42K/C125A, D20V/R38A/F42K/E62A, D20V/R38A/F42K/E62A/C125A, R38A/F42K/N88G, R38A/F42K/N88G/C125A, R38A/F42K/E62A/N88G, and R38A/F42K/E62A/N88G/C125A; or
IL-2Rα and IL-2Rγ, optionally wherein the modified IL-2 comprises one or more mutations selected from R38A/F42K/Q126G, R38A/F42K/Q126I, and R38A/F42K/Q126Y; or
IL-2Rβ, optionally wherein the modified IL-2 comprises one or more mutations selected from D20E, D20F, D20G, D20H, D20I, D20K, D20L, D20V, N88G, N88E, N88K, N88Q, N88V, D20E/C125A, D20F/C125A, D20G/C125A, D20H/C125A, D20I/C125A, D20L/C125A, D20K/C125A, D20N/C125A, D20S/C125A, D20T/C125A, D20V/C125A, N88A/C125A, N88D/C125A, N88G/C125A, N88E/C125A, N88H/C125A, N88I/C125A, N88K/C125A, N88Q/C125A, N88R/C125A, N88T/C125A, and N88V/C125A; or
IL-2Rγ, optionally wherein the modified IL-2 comprises one or more mutations selected from Q126A, Q126E, Q126F, Q126G, Q126H, Q126I, Q126K, Q126L, Q126N, Q126P, Q126R, Q126S, Q126T, Q126V, Q126W, and Q126Y, or a combination thereof.

14. The chimeric protein or protein complex of any one of claims 1 to 9, wherein the modified IL-2 exhibits reduced affinity for IL-2Rβγ, optionally wherein the modified IL-2 comprises one or more mutations selected from D20E/Q126A, D20E/Q126D, D20E/Q126E, D20E/Q126F, D20E/Q126G, D20E/Q126H, D20E/Q126I, D20E/Q126K, D20E/Q126L, D20E/Q126M, D20E/Q126N, D20E/Q126P, D20E/Q126R, D20E/Q126S, D20E/Q126T, D20E/Q126V, D20E/Q126W, D20E/Q126Y, D20V/Q126A, D20V/Q126D, D20V/Q126E, D20V/Q126F, D20V/Q126G, D20V/Q126H, D20V/Q126I, D20V/Q126K, D20V/Q126L, D20V/Q126M, D20V/Q126N, D20V/Q126P, D20V/Q126R, D20V/Q 126S, D20V/Q126T, D20V/Q126V, D20V/Q126W, D20V/Q126Y, N88A/Q126A, N88A/Q126D, N88A/Q126E, N88A/Q126F, N88A/Q126G, N88A/Q126H, N88A/Q126I, N88A/Q126K, N88A/Q126L, N88A/Q126M, N88A/Q126N, N88A/Q126P, N88A/Q126R, N88A/Q126S, N88A/Q126T, N88A/Q126V, N88A/Q126W, N88A/Q126Y, N88G/Q126A, N88G/Q126D, N88G/Q126E, N88G/Q126F, N88G/Q126G, N88G/Q126H, N88G/Q126I, N88G/Q126K, N88G/Q126L, N88G/Q126M, N88G/Q126N, N88G/Q126P, N88G/Q126R, N88G/Q126S, N88G/Q126T, N88G/Q126V, N88G/Q126W, and N88G/Q126Y.

15. The chimeric protein or protein complex of any one of claims 1 to 14, wherein the one or more mutations in the IL-2 signaling agent confers reduced affinity or bioactivity that is restorable by attachment to one or more targeting moieties.

16. The chimeric protein or protein complex of any one of the above claims, wherein the one or more targeting moieties are directed against a tumor cell, endothelial cell, epithelial cell, mesenchymal cell, tumor stroma or stromal cell, and/or ECM.

17. The chimeric protein or protein complex of any one of the above claims, wherein the one or more targeting moieties are directed against an immune cell and/or organ cells, and/or tissue cells.

18. The chimeric protein or protein complex of claim 17, wherein the immune cell is selected from a T cell, a Treg, a cytotoxic T lymphocyte, a T helper cell, a B cell, a dendritic cell, an anti-tumor or tumor-associated macrophage (e.g., a M1 or M2 macrophage), a neutrophil, myeloid derived suppressor cell, a natural killer (NK) cell, and a natural killer T (NKT) cell, optionally, the immune cell is a T cell and the targeting moiety targets CD8, or optionally wherein the immune cell is a Treg and the targeting moiety targets CTLA4, or optionally wherein the immune cell is an NK cell and the targeting moiety is NKp46.

19. The chimeric protein or protein complex of any one of the above claims, wherein the targeting moiety comprises a recognition domain that is a full-length antibody, a single-domain antibody, a recombinant heavy-chain-only antibody (VHH), a single-chain antibody (scFv), a shark heavy-chain-only antibody (VNAR), a microprotein (e.g. cysteine knot protein, knottin), a darpin, an anticalin, an adnectin, an aptamer, a Fv, a Fab, a Fab′, a F(ab′)₂, a peptide mimetic molecule, a natural ligand for a receptor, or a synthetic molecule.

20. The chimeric protein or protein complex of any one of the above claims, wherein the recognition domain is a single-domain antibody.

21. The chimeric protein or protein complex of any one of the above claims, wherein the recognition domain is a VHH or humanized VHH.

22. The chimeric protein or protein complex of any one of the above claims, wherein the recognition domain functionally modulates the antigen or receptor of interest.

23. The chimeric protein or protein complex of any one of the above claims, wherein the recognition domain binds but does not functionally modulate the antigen or receptor of interest.

24. The chimeric protein or protein complex of any one of the above claims, comprising two or more targeting moieties.

25. The chimeric protein or protein complex of any one of the above claims, wherein the targeting moieties binds to one or more of the following targets: CD8, CTLA4, CD3, CD4, DNAM-1, Nrp1 (neurophilin), TNFR1, TNFR2, GITR, ICOS, CD20, CD70, Clec9a, NKp46, PD-1, PD-L1, PD-L2, SIRP1a, FAP, XCR1, tenascin, or ECM proteins.

26. The chimeric protein or protein complex of any one of the above claims, further comprising one or more additional modified signaling agents.

27. The chimeric protein or protein complex of any one of the above claims, wherein the chimeric protein comprises two signaling agents and one targeting moiety or two targeting moieties and one signaling agent or two of both.

28. The chimeric protein or protein complex of any one of the above claims, wherein the chimeric protein comprises three signaling agents or three targeting moieties or three of both.

29. The chimeric protein or protein complex of claim 26, wherein the additional modified signaling agent comprises one or more mutations conferring reduced affinity or activity for a receptor relative to an unmutated signaling agent.

30. The chimeric protein or protein complex of claim 29, wherein the one or more mutations allow for attenuation of activity.

31. The chimeric protein or protein complex of claim 30, wherein agonistic or antagonistic activity is attenuated.

32. The chimeric protein or protein complex of any one of the above claims, wherein the chimeric protein is suitable for use in a patient having one or more of: cancer, infections, immune disorders, autoimmune diseases, cardiovascular diseases, wound, ischemia-related diseases, neurodegenerative diseases, and/or metabolic diseases.

33. A recombinant nucleic acid composition encoding one or more chimeric proteins or protein complexes of any one of the above claims.

34. A host cell comprising the recombinant nucleic acid of claim 33.

35. A method for treating cancer, comprising administering an effective amount of the chimeric protein or protein complex of any one of claims 1-32 to a patient in need thereof.

36. The method of claim 35, wherein the cancer is selected form one or more of basal cell carcinoma, biliary tract cancer; bladder cancer; bone cancer; brain and central nervous system cancer; breast cancer; cancer of the peritoneum; cervical cancer; choriocarcinoma; colon and rectum cancer; connective tissue cancer; cancer of the digestive system; endometrial cancer; esophageal cancer; eye cancer; cancer of the head and neck; gastric cancer (including gastrointestinal cancer); glioblastoma; hepatic carcinoma; hepatoma; intra-epithelial neoplasm; kidney or renal cancer; larynx cancer; leukemia; liver cancer; lung cancer (e.g., small-cell lung cancer, non-small cell lung cancer, adenocarcinoma of the lung, and squamous carcinoma of the lung); melanoma; myeloma; neuroblastoma; oral cavity cancer (lip, tongue, mouth, and pharynx); ovarian cancer; pancreatic cancer; prostate cancer; retinoblastoma; rhabdomyosarcoma; rectal cancer; cancer of the respiratory system; salivary gland carcinoma; sarcoma (e.g., Kaposi's sarcoma); skin cancer; squamous cell cancer; stomach cancer; testicular cancer; thyroid cancer; uterine or endometrial cancer; cancer of the urinary system; vulval cancer; lymphoma including Hodgkin's and non-Hodgkin's lymphoma, as well as B-cell lymphoma (including low grade/follicular non-Hodgkin's lymphoma (NHL); small lymphocytic (SL) NHL; intermediate grade/follicular NHL; intermediate grade diffuse NHL; high grade immunoblastic NHL; high grade lymphoblastic NHL; high grade small non-cleaved cell NHL; bulky disease NHL; mantle cell lymphoma; AIDS-related lymphoma; and Waldenstrom's Macroglobulinemia; chronic lymphocytic leukemia (CLL); acute lymphoblastic leukemia (ALL); Hairy cell leukemia; chronic myeloblastic leukemia; as well as other carcinomas and sarcomas; and post-transplant lymphoproliferative disorder (PTLD), as well as abnormal vascular proliferation associated with phakomatoses, edema (e.g. that associated with brain tumors), and Meigs' syndrome.

37. Use of a chimeric protein or protein complex of any one of claims 1-32 in the manufacture of a medicament.

38. Use of a chimeric protein or protein complex of any one of claims 1-31 in the treatment of cancer or autoimmune disease in a subject in need thereof.

39. A Fc-based chimeric protein complex comprising:
(a) a modified IL-2 signaling agent, wherein the modified IL-2 signaling agent has one or more mutations or modifications relative to a wild type signaling agent having SEQ ID NO: 1 that confer improved safety and reduced affinity or bioactivity of the modified IL-2 signaling agent for IL-2Rαβγ and/or IL-2Rβ and/or IL-2Rγ and/or IL-2Rα, relative to the wild type IL-2 signaling agent; and
(b) one or more targeting moieties, said targeting moieties comprising recognition domains which specifically bind to antigens or receptors of interest; and
(c) a Fc domain, the Fc domain optionally having one or more mutations that reduces or eliminates one or more effector functions of the Fc domain, promotes Fc chain pairing in the Fc domain, and/or stabilizes a hinge region in the Fc domain,
wherein the modified IL-2 signaling agent comprises:
(i) a mutation selected from D20E, D20F, D20G, D20H, D20I, D20K, D20L, and D20V; or
(ii) a mutation selected from N88G, N88E, N88K, N88Q, and N88V; or
(iii) a mutation selected from Q126G, Q126A, Q126E, Q126F, Q126H, Q126I, Q126K, Q126L, Q126N, Q126P, Q126R, Q126S, Q126T, Q126V, Q126W, and Q126Y; or
(iv) a mutation selected from (i) and (iii) or a mutation selected from (ii) and (iii); or
(v) one or more mutations selected from:
R38A/F42K/N88G/C125A,
F42K/C125A,
D20E/C125A,
D20F/C125A,
D20G/C125A,
D20H/C125A,
D20I/C125A,
D20K/C125A,
D20L/C125A,
D20N/C125A,
D20S/C125A,
D20T/C125A,
D20V/C125A,
N88A/C125A,
N88D/C125A,
N88G/C125A,
N88E/C125A,
N88H/C125A,
N88I/C125A,
N88K/C125A,
N88Q/C125A,
N88R/C125A,
N88T/C125A,
N88V/C125A,
D20E/R38A/F42K,
D20E/R38A/F42K/C125A,
D20V/R38A/F42K,
D20V/R38A/F42K/C125A,
R38A/F42Y/E62A/C125A,
R38A/F42Y/Y45A/E62A,
F42Y/Y45A/L72G,
R38A/F42Y/Y45A/E62A/C125A,
F42Y/Y45A/L72G/C125A,
R38A/F42K/N88G,
R38A/F42K/Q126G,
R38A/F42K/Q126I,
R38A/F42K/Q126Y,
R38A/F42K/Q126G/C125A,
R38A/F42K/Q1261/C125A,
R38A/F42K/Q126Y/C125A,
R38A/F42K/E62A/N88G, and
R38A/F42K/E62A/N88G/C125A.

40. The Fc-based chimeric protein complex of claim 39, wherein the modified IL-2-signaling agent further comprises a glycosylation mutation, wherein the mutation decreases or eliminates glycosylation of the modified IL-2 signaling agent.

41. The Fc-based chimeric protein complex of claim 40, wherein the glycosylation mutation is a T3 substitution, wherein the mutation is one of T3A, T3F, T3H, T3L, T3V, and T3Y.

42. The Fc-based chimeric protein complex of claim 40, wherein the glysosylation mutation is a deletion of the first 3, 4, 5, 6, 7, or 8 residues of the modified IL-2.

43. A Fc-based chimeric protein complex comprising:
(a) a modified IL-2 signaling agent, wherein the modified IL-2 signaling agent has one or more mutations or modifications relative to a wild type signaling agent having SEQ ID NO: 1 that confer improved safety and reduced affinity or bioactivity of the modified IL-2 signaling agent for IL-2Rαβγ and/or IL-2Rβ and/or IL-2Rγ and/or IL-2Rα, relative to the wild type IL-2 signaling agent; and
(b) one or more targeting moieties, said targeting moieties comprising recognition domains which specifically bind to antigens or receptors of interest; and
(c) a Fc domain, the Fc domain optionally having one or more mutations that reduces or eliminates one or more effector functions of the Fc domain, promotes Fc chain pairing in the Fc domain, and/or stabilizes a hinge region in the Fc domain,
wherein the modified IL-2 signaling agent comprises a glycosylation mutation, wherein the mutation decreases or eliminates glycosylation of the modified IL-2 signaling agent.

44. The Fc-based chimeric protein complex of claim 43, wherein the glycosylation mutation is a T3 substitution, optionally wherein the mutation is one of T3A, T3F, T3H, T3L, T3V, and T3Y.

45. The Fc-based chimeric protein complex of claim 43, wherein the glysosylation mutation is a deletion of the first 3, 4, 5, 6, 7, or 8 residues of the modified IL-2.

46. A Fc-based chimeric protein complex comprising:
(a) a modified IL-2 signaling agent, wherein the modified IL-2 signaling agent has one or more mutations or modifications relative to a neoleukin signaling agent having SEQ ID NO: 2 that confer improved safety and reduced affinity or bioactivity of the modified IL-2 signaling agent for IL-2Rαβγ and/or IL-2Rβ and/or IL-2Rγ and/or IL-2Rα, relative to the neoleukin signaling agent; and
(b) one or more targeting moieties, said targeting moieties comprising recognition domains which specifically bind to antigens or receptors of interest,
wherein the modified IL-2 signaling agent, and the one or more targeting moieties are optionally connected with one or more linkers,
wherein the modified IL-2 signaling agent comprises one or more mutations at a position selected from D15 and N40, optionally wherein the mutation is selected from D15T, D15H, N401, N40G, and N40R.

47. The Fc-based chimeric protein complex of any one of claims 39-46, wherein the modified IL-2 comprises one or more mutations that confer reduced affinity for an IL-2 receptor.

48. The Fc-based chimeric protein complex of any one of claims 39-47, wherein the modified IL-2 exhibits reduced affinity for IL-2Rαβγ.

49. The Fc-based chimeric protein complex of any one of claims 39-47, wherein the modified IL-2 exhibits reduced affinity for IL-2Rβ, IL-2Rγ, or a combination thereof.

50. The Fc-based chimeric protein complex of any one of claims 39-47, wherein the modified IL-2 exhibits ablated affinity for IL-2Rα, IL-2Rαβ, IL-2Rγ, or a combination thereof.

51. The Fc-based chimeric protein complex of claim 48, wherein the modified IL-2 exhibits reduced affinity for:
IL-2Rα and IL2Rβ, optionally wherein the modified IL-2 comprises one or more mutations selected from D20E/R38A/F42K, D20E/R38A/F42K/C125A, D20V/R38A/F42K, D20V/R38A/F42K/C125A, D20V/R38A/F42K/E62A, D20V/R38A/F42K/E62A/C125A, R38A/F42K/N88G, R38A/F42K/N88G/C125A, R38A/F42K/E62A/N88G, and R38A/F42K/E62A/N88G/C125A; or
IL-2Rα and IL-2Rγ, optionally wherein the modified IL-2 comprises one or more mutations selected from R38A/F42K/Q126G, R38A/F42K/Q126I, and R38A/F42K/Q126Y; or
IL-2Rβ, optionally wherein the modified IL-2 comprises one or more mutations selected from D20E, D20F, D20G, D20H, D20I, D20K, D20L, D20V, N88G, N88E, N88K, N88Q, N88V, D20E/C125A, D20F/C125A, D20G/C125A, D20H/C125A, D20I/C125A, D20L/C125A, D20K/C125A, D20N/C125A, D20S/C125A, D20T/C125A, D20V/C125A, N88A/C125A, N88D/C125A, N88G/C125A, N88E/C125A, N88H/C125A, N88I/C125A, N88K/C125A, N88Q/C125A, N88R/C125A, N88T/C125A, and N88V/C125A; or
IL-2Rγ, optionally wherein the modified IL-2 comprises one or more mutations selected from Q126A, Q126E, Q126F, Q126G, Q126H, Q126I, Q126K, Q126L, Q126N, Q126P, Q126R, Q126S, Q126T, Q126V, Q126W, and Q126Y, or a combination thereof.

52. The Fc-based chimeric protein complex of any one of claims 39-47, wherein the modified IL-2 exhibits reduced affinity for IL-2Rβγ, optionally wherein the modified IL-2 comprises one or more mutations selected from D20E/Q126A, D20E/Q126D, D20E/Q126E, D20E/Q126F, D20E/Q126G, D20E/Q126H, D20E/Q126I, D20E/Q126K, D20E/Q126L, D20E/Q126M, D20E/Q126N, D20E/Q126P, D20E/Q126R, D20E/Q126S, D20E/Q126T, D20E/Q126V, D20E/Q126W, D20E/Q126Y, D20V/Q126A, D20V/Q126D, D20V/Q126E, D20V/Q126F, D20V/Q126G, D20V/Q126H, D20V/Q126I, D20V/Q126K, D20V/Q126L, D20V/Q126M, D20V/Q126N, D20V/Q126P, D20V/Q126R, D20V/Q126S, D20V/Q126T, D20V/Q126V, D20V/Q126W, D20V/Q126Y, N88A/Q126A, N88A/Q126D, N88A/Q126E, N88A/Q126F, N88A/Q126G, N88A/Q126H, N88A/Q126I, N88A/Q126K, N88A/Q126L, N88A/Q126M, N88A/Q126N, N88A/Q126P, N88A/Q126R, N88A/Q126S, N88A/Q126T, N88A/Q126V, N88A/Q126W, N88A/Q126Y, N88G/Q126A, N88G/Q126D, N88G/Q126E, N88G/Q126F, N88G/Q126G, N88G/Q126H, N88G/Q126I, N88G/Q126K, N88G/Q126L, N88G/Q126M, N88G/Q126N, N88G/Q126P, N88G/Q126R, N88G/Q126S, N88G/Q126T, N88G/Q126V, N88G/Q126W, and N88G/Q126Y.

53. The Fc-based chimeric protein complex of any one of claims 39-52, wherein the one or more mutations in the IL-2 signaling agent confers reduced affinity or bioactivity that is restorable by attachment to one or more targeting moieties or upon inclusion in the Fc-based chimeric protein complex.

54. The Fc-based chimeric protein complex of any one of claims 39-53, wherein the one or more targeting moieties are directed against a tumor cell, endothelial cell, epithelial cell, mesenchymal cell, tumor stroma or stromal cell, and/or ECM.

55. The Fc-based chimeric protein complex of any one of claims 39-54, wherein the one or more targeting moieties are directed against an immune cell and/or organ cells, and/or tissue cells.

56. The Fc-based chimeric protein complex of claim 55, wherein the immune cell is selected from a T cell, a B cell, a dendritic cell, a macrophage, a neutrophil, a mast cell, a monocyte, a red blood cell, myeloid cell, myeloid derived suppressor cell, a NKT cell, and a NK cell, or derivatives thereof, optionally, wherein the immune cell is a T cell and the targeting moiety targets CD8, or optionally wherein the immune cell is a Treg and the targeting moiety targets CTLA4, or optionally wherein the immune cell is an NK cell and the targeting moiety is NKp46.

57. The Fc-based chimeric protein complex of any one of claims 39-56, wherein the targeting moiety comprises a recognition domain that is a full-length antibody, a single-domain antibody, a recombinant heavy-chain-only antibody (VHH), a single-chain antibody (scFv), a shark heavy-chain-only antibody (VNAR), a microprotein (e.g. cysteine knot protein, knottin), a darpin, an anticalin, an adnectin, an aptamer, a Fv, a Fab, a Fab′, a F(ab′)₂, a peptide mimetic molecule, a natural ligand for a receptor, or a synthetic molecule.

58. The Fc-based chimeric protein complex of any one of claims 39-57, wherein the recognition domain is a single-domain antibody.

59. The Fc-based chimeric protein complex of any one of claims 39-58, wherein the recognition domain is a V_{HH} or humanized V_{HH}.

60. The Fc-based chimeric protein complex of any one of claims 39-59, wherein the recognition domain functionally modulates the antigen or receptor of interest.

61. The Fc-based chimeric protein complex of any one of claims 39-60, wherein the recognition domain binds but does not functionally modulate the antigen or receptor of interest.

62. The Fc-based chimeric protein complex of any one of claims 39-61, comprising two or more targeting moieties.

63. The Fc-based chimeric protein complex of any one of claims 39-62, wherein the targeting moieties binds to one or more of the following targets: CD8, CTLA4, CD3, CD4, DNAM-1, Nrp1 (neurophilin), TNFR1, TNFR2, GITR, ICOS, CD20, CD70, Clec9a, NKp46, PD-1, PD-L1, PD-L2, SIRP1a, FAP, XCR1, tenascin, or ECM proteins.

64. The Fc-based chimeric protein complex of any one of claims 39-63, further comprising one or more additional modified signaling agents.

65. The Fc-based chimeric protein complex of any one of claims 39-64, wherein the chimeric protein comprises two signaling agents or two targeting moieties or two of both.

66. The Fc-based chimeric protein complex of any one of claims 39-65, wherein the chimeric protein comprises three signaling agents or three targeting moieties or three of both.

67. The Fc-based chimeric protein complex of claim 64, wherein the additional modified signaling agent comprises one or more mutations conferring reduced affinity or activity for a receptor relative to an unmutated signaling agent.

68. The Fc-based chimeric protein complex of claim 67, wherein the one or more mutations allow for attenuation of activity.

69. The Fc-based chimeric protein complex of claim 68, wherein agonistic or antagonistic activity is attenuated.

70. The Fc-based chimeric protein complex of any one of claims 39-69, wherein the chimeric protein is suitable for use in a patient having one or more of: cancer, infections, immune disorders, autoimmune diseases, cardiovascular diseases, wounds, ischemia-related diseases, neurodegenerative diseases, and/or metabolic diseases.

71. A recombinant nucleic acid composition encoding one or more Fc-based chimeric protein complexes of any one of claims 39-70, or a constituent polypeptide thereof.

72. A host cell comprising the recombinant nucleic acid of claim 71.

73. A method for treating cancer, comprising administering an effective amount of the (i) Fc-based chimeric protein complex of any one of claims 39-69 to a patient in need thereof; ii) the recombinant nucleic acid of claim 71 to a patient in need thereof; or iii) the host cell of claim 72 to a patient in need thereof.

74. The method of claim 73, wherein the cancer is selected form one or more of basal cell carcinoma, biliary tract cancer; bladder cancer; bone cancer; brain and central nervous system cancer; breast cancer; cancer of the peritoneum; cervical cancer; choriocarcinoma; colon and rectum cancer; connective tissue cancer; cancer of the digestive system; endometrial cancer; esophageal cancer; eye cancer; cancer of the head and neck; gastric cancer (including gastrointestinal cancer); glioblastoma; hepatic carcinoma; hepatoma; intra-epithelial neoplasm; kidney or renal cancer; larynx cancer; leukemia; liver cancer; lung cancer (e.g., small-cell lung cancer, non-small cell lung cancer, adenocarcinoma of the lung, and squamous carcinoma of the lung); melanoma; myeloma; neuroblastoma; oral cavity cancer (lip, tongue, mouth, and pharynx); ovarian cancer; pancreatic cancer; prostate cancer; retinoblastoma; rhabdomyosarcoma; rectal cancer; cancer of the respiratory system; salivary gland carcinoma; sarcoma (e.g., Kaposi's sarcoma); skin cancer; squamous cell cancer; stomach cancer; testicular cancer; thyroid cancer; uterine or endometrial cancer; cancer of the urinary system; vulval cancer; lymphoma including Hodgkin's and non-Hodgkin's lymphoma, as well as B-cell lymphoma (including low grade/follicular non-Hodgkin's lymphoma (NHL); small lymphocytic (SL) NHL; intermediate grade/follicular NHL; intermediate grade diffuse NHL; high grade mantle cell lymphoma; AIDS-related lymphoma; and Waldenstrom's Macroglobulinemia; chronic lymphocytic leukemia (CLL); acute lymphoblastic leukemia (ALL); Hairy cell leukemia; chronic myeloblastic leukemia; as well as other carcinomas and sarcomas; and post-transplant lymphoproliferative disorder (PTLD), as well as abnormal vascular proliferation associated with phakomatoses, edema (e.g. that associated with brain tumors), and Meigs' syndrome.

75. Use of a Fc-based chimeric protein complex of any one of claims 39-70 in the manufacture of a medicament.

76. Use of a Fc-based chimeric protein complex of any one of claims 39-69 in the treatment of cancer or autoimmune disease in a subject in need thereof.

77. The Fc-based chimeric protein complex of any one of claims 39-70, wherein the Fc domain is from IgG, IgA, IgD, IgM or IgE.

78. The Fc-based chimeric protein complex of claim 77, wherein the IgG is selected from IgG1, IgG2, IgG3, or IgG4.

79. The Fc-based chimeric protein complex of any one of claims 39-70, wherein the Fc domain is from human IgG, IgA, IgD, IgM or IgE.

80. The Fc-based chimeric protein complex of claim 79, wherein the human IgG is selected from human IgG1, IgG2, IgG3, or IgG4.

81. The Fc-based chimeric protein complex of any one of claims 39-70 and 77-80, wherein the Fc chain pairing is promoted by ionic pairing and/or a knob-in-hole pairing.

82. The Fc-based chimeric protein complex of any one of claims 39-70 and 77-81, wherein the one or more mutations to the Fc domain results in an ionic pairing between the Fc chains in the Fc domain.

83. The Fc-based chimeric protein complex of any one of claims 39-70 and 77-82, wherein the one or more mutations to the Fc domain results in a knob-in-hole pairing in the Fc domain.

84. The Fc-based chimeric protein complex of any one of claims 39-70 and 77-83, wherein the one or more mutations to the Fc domain results in the reduction or elimination of an effector function of the Fc domain.

85. The Fc based chimeric protein complex of any one of claims 39-70 and 77-84, wherein the Fc-based chimeric protein complex is a heterodimer and has a trans orientation/configuration, as relates to any targeting moiety and signaling agent, relative to each other, or any targeting moieties relative to each other, or any signaling agents relative to each other.

86. The Fc based chimeric protein complex of any one of claims 39-70 and 77-85, wherein the Fc-based chimeric protein complex is a heterodimer and has a cis orientation, as relates to any targeting moiety and signaling agent, relative to each other, or any targeting moieties relative to each other, or any signaling agents relative to each other.

87. The Fc based chimeric protein complex of any one of claims 39-70 and 77-86, wherein the Fc comprises L234A, L235A, and K322Q substitutions in human IgG1 (according to EU numbering).

88. The Fc-based chimeric protein complex of any one of claims 39-70 and 77-87, wherein the Fc is human IgG1, and optionally contains one or more mutations of L234, L235, K322, D265, P329, and P331 (according to EU numbering).

89. The Fc-based chimeric protein complex of any one of claims 39-70 and 77-88, wherein the Fc-based chimeric protein complex has an orientation and/or configuration of any one of FIGS. 1A-F, 2A-H, 3A-H, 4A-D, 5A-F, 6A-J, 7A-D, 8A-F, 9A-J, 10A-F, 11A-L, 12A-L, 13A-F, 14A-L, 15A-L, 16A-J, 17A-J, 18A-F, 19A-F, 31, and 32.

90. The Fc-based chimeric protein complex of any one of claims 39-70 and 77-89, wherein the Fc-based chimeric protein complex comprises a polypeptide having an amino acid sequence having at least 90%, or at least 95%, or at least 96%, or at least 97%, or at least 98%, or at least 99% identity with any one of SEQ ID NOs: 292, 293, 294, 299, 301, 310, 311, 312, 315, 316, 319, 320, 325, 328, 332, 333, and 335.

91. The chimeric protein of any one of claims 1-32 or the Fc-based chimeric protein complex of any one of claim 39-70 or 77-89, wherein the chimeric protein or Fc-based chimeric protein complex comprises a polypeptide having an amino acid sequence having at least 90%, or at least 95%, or at least 96%, or at least 97%, or at least 98%, or at least 99% identity with any one of SEQ ID NOs: 290-449, 478-495, or 501-531.

92. A chimeric protein or protein complex comprising:
(a) a modified IL-2 signaling agent, wherein the modified IL-2 signaling agent has a single mutation relative to a wild type signaling agent having SEQ ID NO: 1 that confers improved safety and reduced affinity or bioactivity of the modified IL-2 signaling agent for IL-2Rβ, relative to the wild type IL-2 signaling agent; and
(b) one or more targeting moieties, said targeting moieties comprising recognition domains which specifically bind to antigens or receptors of interest,
wherein the modified IL-2, and the one or more targeting moieties are optionally connected with one or more linkers,
wherein the single mutation is selected from D20E, D20F, D20G, D20H, D20I, D20K, D20L, D20N, D20V, N88G, N88E, N88I, N88K, N88Q, N88R and N88V, and
wherein the modified IL-2 signaling agent does not comprise a mutation that confers reduced affinity or bioactivity for IL-2Rα.

93. The chimeric protein or protein complex of claim 92, wherein the modified IL-2-signaling agent further comprises a glycosylation mutation, wherein the mutation decreases or eliminates glycosylation of the modified IL-2 signaling agent.

94. The chimeric protein or protein complex of claim 93, wherein the glycosylation mutation is a T3 substitution, wherein the mutation is one of T3A, T3F, T3H, T3L, T3V, and T3Y.

95. The chimeric protein or protein complex of claim 93, wherein the glysosylation mutation is a deletion of the first 3, 4, 5, 6, 7, or 8 residues of the modified IL-2.

96. The chimeric protein or protein complex of any one of claims 92 to 95, wherein the one or more mutations in the IL-2 signaling agent confers reduced affinity or bioactivity that is restorable by attachment to one or more targeting moieties.

97. The chimeric protein or protein complex of any one of claims 92 to 96, wherein the one or more targeting moieties are directed against a tumor cell, endothelial cell, epithelial cell, mesenchymal cell, tumor stroma or stromal cell, and/or ECM.

98. The chimeric protein or protein complex of any one of claims 92 to 97, wherein the one or more targeting moieties are directed against an immune cell and/or organ cells, and/or tissue cells.

99. The chimeric protein or protein complex of claim 98, wherein the immune cell is selected from a T cell, a Treg, a cytotoxic T lymphocyte, a T helper cell, a B cell, a dendritic cell, an anti-tumor or tumor-associated macrophage (e.g., a M1 or M2 macrophage), a neutrophil, myeloid derived suppressor cell, a natural killer (NK) cell, and a natural killer T (NKT) cell, optionally, the immune cell is a T cell and the targeting moiety targets CD8, or optionally wherein the immune cell is a Treg and the targeting moiety targets CTLA4, or optionally wherein the immune cell is an NK cell and the targeting moiety is NKp46.

100. The chimeric protein or protein complex of any one of claims 92 to 99, wherein the targeting moiety comprises a recognition domain that is a full-length antibody, a single-domain antibody, a recombinant heavy-chain-only antibody (VHH), a single-chain antibody (scFv), a shark heavy-chain-only antibody (VNAR), a microprotein (e.g. cysteine knot protein, knottin), a darpin, an anticalin, an adnectin, an aptamer, a Fv, a Fab, a Fab′, a F(ab′)₂, a peptide mimetic molecule, a natural ligand for a receptor, or a synthetic molecule.

101. The chimeric protein or protein complex of any one of claims 92 to 100, wherein the recognition domain is a single-domain antibody.

102. The chimeric protein or protein complex of any one of claims 92 to 101, wherein the recognition domain is a VHH or humanized VHH.

103. The chimeric protein or protein complex of any one of claims 92 to 102, wherein the recognition domain functionally modulates the antigen or receptor of interest.

104. The chimeric protein or protein complex of any one of claims 92 to 103, wherein the recognition domain binds but does not functionally modulate the antigen or receptor of interest.

105. The chimeric protein or protein complex of any one of claims 92 to 104, comprising two or more targeting moieties.

106. The chimeric protein or protein complex of any one of claims 92 to 105, wherein the targeting moieties binds to one or more of the following targets: CD8, CTLA4, CD3, CD4, DNAM-1, Nrp1 (neurophilin), TNFR1, TNFR2, GITR, ICOS, CD20, CD70, Clec9a, NKp46, PD-1, PD-L1, PD-L2, SIRP1a, FAP, XCR1, tenascin, or ECM proteins.

107. The chimeric protein or protein complex of any one of claims 92 to 106, further comprising one or more additional modified signaling agents.

108. The chimeric protein or protein complex of any one of claims 92 to 107, wherein the chimeric protein comprises two signaling agents and one targeting moiety or two targeting moieties and one signaling agent or two of both.

109. The chimeric protein or protein complex of any one of the claims 92 to 108, wherein the chimeric protein comprises three signaling agents or three targeting moieties or three of both.

110. The chimeric protein or protein complex of claim 107, wherein the additional modified signaling agent comprises one or more mutations conferring reduced affinity or activity for a receptor relative to an unmutated signaling agent.

111. The chimeric protein or protein complex of claim 110, wherein the one or more mutations allow for attenuation of activity.

112. The chimeric protein or protein complex of claim 111, wherein agonistic or antagonistic activity is attenuated.

113. The chimeric protein or protein complex of any one of claims 92 to 112, wherein the chimeric protein is suitable for use in a patient having one or more of: cancer, infections, immune disorders, autoimmune diseases, cardiovascular diseases, wound, ischemia-related diseases, neurodegenerative diseases, and/or metabolic diseases.

114. A recombinant nucleic acid composition encoding one or more chimeric proteins or protein complexes of any one of claims 92 to 112.

115. A host cell comprising the recombinant nucleic acid of claim 114.

116. A method for treating cancer, comprising administering an effective amount of the chimeric protein or protein complex of any one of claims 92 to 112 to a patient in need thereof.

117. The method of claim 116, wherein the cancer is selected form one or more of basal cell carcinoma, biliary tract cancer; bladder cancer; bone cancer; brain and central nervous system cancer; breast cancer; cancer of the peritoneum; cervical cancer; choriocarcinoma; colon and rectum cancer; connective tissue cancer; cancer of the digestive system; endometrial cancer; esophageal cancer; eye cancer; cancer of the head and neck; gastric cancer (including gastrointestinal cancer); glioblastoma; hepatic carcinoma; hepatoma; intra-epithelial neoplasm; kidney or renal cancer; larynx cancer; leukemia; liver cancer; lung cancer (e.g., small-cell lung cancer, non-small cell lung cancer, adenocarcinoma of the lung, and squamous carcinoma of the lung); melanoma; myeloma; neuroblastoma; oral cavity cancer (lip, tongue, mouth, and pharynx); ovarian cancer; pancreatic cancer; prostate cancer; retinoblastoma; rhabdomyosarcoma; rectal cancer; cancer of the respiratory system; salivary gland carcinoma; sarcoma (e.g., Kaposi's sarcoma); skin cancer; squamous cell cancer; stomach cancer; testicular cancer; thyroid cancer; uterine or endometrial cancer; cancer of the urinary system; vulval cancer; lymphoma including Hodgkin's and non-Hodgkin's lymphoma, as well as B-cell lymphoma (including low grade/follicular non-Hodgkin's lymphoma (NHL); small lymphocytic (SL) NHL; intermediate grade/follicular NHL; intermediate grade diffuse NHL; high grade mantle cell lymphoma; AIDS-related lymphoma; and Waldenstrom's Macroglobulinemia; chronic lymphocytic leukemia (CLL); acute lymphoblastic leukemia (ALL); Hairy cell leukemia; chronic myeloblastic leukemia; as well as other carcinomas and sarcomas; and post-transplant lymphoproliferative disorder (PTLD), as well as abnormal vascular proliferation associated with phakomatoses, edema (e.g. that associated with brain tumors), and Meigs' syndrome.

118. Use of a chimeric protein or protein complex of any one of claims 92 to 112 in the manufacture of a medicament.

119. Use of a chimeric protein or protein complex of any one of claims 92 to 112 in the treatment of cancer or autoimmune disease in a subject in need thereof.

120. A Fc-based chimeric protein complex comprising:
(a) a modified IL-2 signaling agent, wherein the modified IL-2 signaling agent has a single mutation relative to a wild type signaling agent having SEQ ID NO: 1 that confers improved safety and reduced affinity or bioactivity of the modified IL-2 signaling agent for IL-2Rβ, relative to the wild type IL-2 signaling agent; and
(b) one or more targeting moieties, said targeting moieties comprising recognition domains which specifically bind to antigens or receptors of interest; and
(c) a Fc domain, the Fc domain optionally having one or more mutations that reduces or eliminates one or more effector functions of the Fc domain, promotes Fc chain pairing in the Fc domain, and/or stabilizes a hinge region in the Fc domain,
wherein the single mutation is selected from D20E, D20F, D20G, D20H, D20I, D20K, D20L, D20N, D20V, N88G, N88E, N88I, N88K, N88Q, N88R and N88V, and
wherein the modified IL-2 signaling agent does not comprise a mutation that confers reduced affinity or bioactivity for IL-2Rα.

121. The Fc-based chimeric protein complex of claim 120, wherein the modified IL-2-signaling agent further comprises a glycosylation mutation, wherein the mutation decreases or eliminates glycosylation of the modified IL-2 signaling agent.

122. The Fc-based chimeric protein complex of claim 121, wherein the glycosylation mutation is a T3 substitution, wherein the mutation is one of T3A, T3F, T3H, T3L, T3V, and T3Y.

123. The Fc-based chimeric protein complex of claim 121, wherein the glysosylation mutation is a deletion of the first 3, 4, 5, 6, 7, or 8 residues of the modified IL-2.

124. The Fc-based chimeric protein complex of any one of claims 120 to 123, wherein the one or more mutations in the IL-2 signaling agent confers reduced affinity or bioactivity that is restorable by attachment to one or more targeting moieties or upon inclusion in the Fc-based chimeric protein complex.

125. The Fc-based chimeric protein complex of any one of claims 120 to 124, wherein the one or more targeting moieties are directed against a tumor cell, endothelial cell, epithelial cell, mesenchymal cell, tumor stroma or stromal cell, and/or ECM.

126. The Fc-based chimeric protein complex of any one of claims 120 to 125, wherein the one or more targeting moieties are directed against an immune cell and/or organ cells, and/or tissue cells.

127. The Fc-based chimeric protein complex of claim 126, wherein the immune cell is selected from a T cell, a B cell, a dendritic cell, a macrophage, a neutrophil, a mast cell, a monocyte, a red blood cell, myeloid cell, myeloid derived suppressor cell, a NKT cell, and a NK cell, or derivatives thereof, optionally, wherein the immune cell is a T cell and the targeting moiety targets CD8, or optionally wherein the immune cell is a Treg and the targeting moiety targets CTLA4, or optionally wherein the immune cell is an NK cell and the targeting moiety is NKp46.

128. The Fc-based chimeric protein complex of any one of claims 120 to 127, wherein the targeting moiety comprises a recognition domain that is a full-length antibody, a single-domain antibody, a recombinant heavy-chain-only antibody (VHH), a single-chain antibody (scFv), a shark heavy-chain-only antibody (VNAR), a microprotein (e.g. cysteine knot protein, knottin), a darpin, an anticalin, an adnectin, an aptamer, a Fv, a Fab, a Fab′, a F(ab′)₂, a peptide mimetic molecule, a natural ligand for a receptor, or a synthetic molecule.

129. The Fc-based chimeric protein complex of any one of claims 120 to 128, wherein the recognition domain is a single-domain antibody.

130. The Fc-based chimeric protein complex of any one of claims 120 to 129, wherein the recognition domain is a VHH or humanized VHH.

131. The Fc-based chimeric protein complex of any one of claims 120 to 130, wherein the recognition domain functionally modulates the antigen or receptor of interest.

132. The Fc-based chimeric protein complex of any one of claims 120 to 131, wherein the recognition domain binds but does not functionally modulate the antigen or receptor of interest.

133. The Fc-based chimeric protein complex of any one of claims 120 to 132, comprising two or more targeting moieties.

134. The Fc-based chimeric protein complex of any one of claims 120 to 133, wherein the targeting moieties binds to one or more of the following targets: CD8, CTLA4, CD3, CD4, DNAM-1, Nrp1 (neurophilin), TNFR1, TNFR2, GITR, ICOS, CD20, CD70, Clec9a, NKp46, PD-1, PD-L1, PD-L2, SIRP1a, FAP, XCR1, tenascin, or ECM proteins.

135. The Fc-based chimeric protein complex of any one of claims 120 to 134, further comprising one or more additional modified signaling agents.

136. The Fc-based chimeric protein complex of any one of claims 120 to 135, wherein the chimeric protein comprises two signaling agents or two targeting moieties or two of both.

137. The Fc-based chimeric protein complex of any one of claims 120 to 136, wherein the chimeric protein comprises three signaling agents or three targeting moieties or three of both.

138. The Fc-based chimeric protein complex of claim 135, wherein the additional modified signaling agent comprises one or more mutations conferring reduced affinity or activity for a receptor relative to an unmutated signaling agent.

139. The Fc-based chimeric protein complex of claim 138, wherein the one or more mutations allow for attenuation of activity.

140. The Fc-based chimeric protein complex of claim 139, wherein agonistic or antagonistic activity is attenuated.

141. The Fc-based chimeric protein complex of any one of claims 120 to 140, wherein the chimeric protein is suitable for use in a patient having one or more of: cancer, infections, immune disorders, autoimmune diseases, cardiovascular diseases, wounds, ischemia-related diseases, neurodegenerative diseases, and/or metabolic diseases.

142. A recombinant nucleic acid composition encoding one or more Fc-based chimeric protein complexes of any one of claims 120 to 140, or a constituent polypeptide thereof.

143. A host cell comprising the recombinant nucleic acid of claim 142.

144. A method for treating cancer, comprising administering an effective amount of the (i) Fc-based chimeric protein complex of any one of claims 120 to 140 to a patient in need thereof; ii) the recombinant nucleic acid of claim 142 to a patient in need thereof; or iii) the host cell of claim 143 to a patient in need thereof.

145. The method of claim 144, wherein the cancer is selected form one or more of basal cell carcinoma, biliary tract cancer; bladder cancer; bone cancer; brain and central nervous system cancer; breast cancer; cancer of the peritoneum; cervical cancer; choriocarcinoma; colon and rectum cancer; connective tissue cancer; cancer of the digestive system; endometrial cancer; esophageal cancer; eye cancer; cancer of the head and neck; gastric cancer (including gastrointestinal cancer); glioblastoma; hepatic carcinoma; hepatoma; intra-epithelial neoplasm; kidney or renal cancer; larynx cancer; leukemia; liver cancer; lung cancer (e.g., small-cell lung cancer, non-small cell lung cancer, adenocarcinoma of the lung, and squamous carcinoma of the lung); melanoma; myeloma; neuroblastoma; oral cavity cancer (lip, tongue, mouth, and pharynx); ovarian cancer; pancreatic cancer; prostate cancer; retinoblastoma; rhabdomyosarcoma; rectal cancer; cancer of the respiratory system; salivary gland carcinoma; sarcoma (e.g., Kaposi's sarcoma); skin cancer; squamous cell cancer; stomach cancer; testicular cancer; thyroid cancer; uterine or endometrial cancer; cancer of the urinary system; vulval cancer; lymphoma including Hodgkin's and non-Hodgkin's lymphoma, as well as B-cell lymphoma (including low grade/follicular non-Hodgkin's lymphoma (NHL); small lymphocytic (SL) NHL; intermediate grade/follicular NHL; intermediate grade diffuse NHL; high grade immunoblastic NHL; high grade lymphoblastic NHL; high grade small non-cleaved cell NHL; bulky disease NHL;
mantle cell lymphoma; AIDS-related lymphoma; and Waldenstrom's Macroglobulinemia; chronic lymphocytic leukemia (CLL); acute lymphoblastic leukemia (ALL); Hairy cell leukemia; chronic myeloblastic leukemia; as well as other carcinomas and sarcomas; and post-transplant lymphoproliferative disorder (PTLD), as well as abnormal vascular proliferation associated with phakomatoses, edema (e.g. that associated with brain tumors), and Meigs' syndrome.

146. Use of a Fc-based chimeric protein complex of any one of claims 120 to 140 in the manufacture of a medicament.

147. Use of a Fc-based chimeric protein complex of any one of claims 120 to 140 in the treatment of cancer or autoimmune disease in a subject in need thereof.

148. The Fc-based chimeric protein complex of any one of claims 120 to 140, wherein the Fc domain is from IgG, IgA, IgD, IgM or IgE.

149. The Fc-based chimeric protein complex of claim 148, wherein the IgG is selected from IgG1, IgG2, IgG3, or IgG4.

150. The Fc-based chimeric protein complex of any one of claims 120 to 140, wherein the Fc domain is from human IgG, IgA, IgD, IgM or IgE.

151. The Fc-based chimeric protein complex of claim 150, wherein the human IgG is selected from human IgG1, IgG2, IgG3, or IgG4.

152. The Fc-based chimeric protein complex of any one of claims 120 to 140 and 148 to 151, wherein the Fc chain pairing is promoted by ionic pairing and/or a knob-in-hole pairing.

153. The Fc-based chimeric protein complex of any one of claims 120 to 140 and 148 to 152, wherein the one or more mutations to the Fc domain results in an ionic pairing between the Fc chains in the Fc domain.

154. The Fc-based chimeric protein complex of any one of claims 120 to 140 and 148 to 153, wherein the one or more mutations to the Fc domain results in a knob-in-hole pairing in the Fc domain.

155. The Fc-based chimeric protein complex of any one of claims 120 to 140 and 148 to 154, wherein the one or more mutations to the Fc domain results in the reduction or elimination of an effector function of the Fc domain.

156. The Fc based chimeric protein complex of any one of claims 120 to 140 and 148 to 155, wherein the Fc-based chimeric protein complex is a heterodimer and has a trans orientation/configuration, as relates to any targeting moiety and signaling agent, relative to each other, or any targeting moieties relative to each other, or any signaling agents relative to each other.

157. The Fc based chimeric protein complex of any one of claims 120 to 140 and 148 to 156, wherein the Fc-based chimeric protein complex is a heterodimer and has a cis orientation, as relates to any targeting moiety and signaling agent, relative to each other, or any targeting moieties relative to each other, or any signaling agents relative to each other.

158. The Fc based chimeric protein complex of any one of claims 120 to 140 and 148 to 157, wherein the Fc comprises L234A, L235A, and K322Q substitutions in human IgG1 (according to EU numbering).

159. The Fc-based chimeric protein complex of any one of claims 120 to 140 and 148 to 158, wherein the Fc is human IgG1, and optionally contains one or more mutations of L234, L235, K322, D265, P329, and P331 (according to EU numbering).

160. The Fc-based chimeric protein complex of any one of claims 120 to 140 and 148 to 159, wherein the Fc-based chimeric protein complex has an orientation and/or configuration of any one of FIGS. 1A-F, 2A-H, 3A-H, 4A-D, 5A-F, 6A-J, 7A-D, 8A-F, 9A-J, 10A-F, 11A-L, 12A-L, 13A-F, 14A-L, 15A-L, 16A-J, 17A-J, 18A-F, 19A-F, 31, and 32.

161. The Fc-based chimeric protein complex of any one of claims 120 to 140 and 148 to 160, wherein the Fc-based chimeric protein complex comprises a polypeptide having an amino acid sequence having at least 90%, or at least 95%, or at least 96%, or at least 97%, or at least 98%, or at least 99% identity with any one of SEQ ID NOs: 292, 293, 294, 299, 301, 310, 311, 312, 315, 316, 319, 320, 325, 328, 332, 333, and 335.

162. The chimeric protein of any one of claims 92 to 112 or the Fc-based chimeric protein complex of any one of claims 120 to 140 or 148 to 160, wherein the chimeric protein or Fc-based chimeric protein complex comprises a polypeptide having an amino acid sequence having at least 90%, or at least 95%, or at least 96%, or at least 97%, or at least 98%, or at least 99% identity with any one of SEQ ID NOs: 290-449, 478-495, or 501-531.
